(19) United States
(12) Patent Application Publication
(10) Pub. No.: US 2005/0208527 A1
(43) Pub. Date: Sep. 22, 2005

(54) Human schizophrenia gene

(75) Inventors: Hreinn Stefansson, Gardabaer (IS); Valgerdur Steinthorsdottir, Reykjavik (IS); Jeffrey R. Gulcher, Lake Barrington, IL (US); Mark E. Gurney, E. Grand Rapids, MI (US); Thorkell Andresson, Reykjavik (IS)

Correspondence Address: HAMILTON, BROOK, SMITH & REYNOLDS, P.C., 530 VIRGINIA ROAD, P.O. BOX 9133, CONCORD, MA, 01742-9133, US

(73) Assignee: deCODE genetics ehf., Reykjavik (IS)

(21) Appl. No.: 10/995,011

(22) Filed: Nov. 22, 2004

Related U.S. Application Data
(63) Continuation of application No. 10/107,604, filed on Mar. 26, 2002.
Application No. 10/107,604 is a continuation-in-part of application No. 09/946,807, filed on Sep. 5, 2001, now abandoned.
Application No. 09/946,807 is a continuation-in-part of application No. PCT/US01/06377, filed on Feb. 28, 2001.
Application No. 09/946,807 is a continuation-in-part of application No. 09/795,668, filed on Feb. 28, 2001, now abandoned.
Application No. 09/795,668 is a continuation-in-part of application No. 09/515,716, filed on Feb. 28, 2000, now abandoned.

(51) Int. Cl. A61K 38/17; C12Q 1/68

(52) U.S. Cl. 435/6; 514/12

(57) ABSTRACT

Nucleic acids comprising the neuregulin 1 gene (NRG1) and encoding NRG1 polypeptides are disclosed. Also described are related nucleic acids encoding NRG1 polypeptides; NRG1 polypeptides; antibodies that bind to NRG1 polypeptides; methods of diagnosis of susceptibility to schizophrenia; assays for agents that alter the activity of NRG1 polypeptide or which identify NRG1 binding agents, and the agents or binding agents identified by the assays; NRG1 therapeutic agents, including the NRG1 nucleic acids, NRG1 polypeptides, or agents that alter the activity of an NRG1 polypeptides; pharmaceutical compositions comprising the NRG1 therapeutic agents; as well as methods of therapy of schizophrenia. Novel haplotypes with a common core haplotype in affected individuals are described, as well as their use in methods for screening for susceptibility to schizophrenia. Also described are hypomorphic mice for use in identifying phenotypes associated with schizophrenia, as well as for use in assessing agents of interest for neuroleptic activity and for potential therapeutic use for treatment of schizophrenia.

### RELATED APPLICATIONS

[0001] This application is a continuation of Ser. No. 10/107,604 filed Mar. 26, 2002, which is a continuation-in-part of U.S. application Ser. No. 09/946,807, filed Sep. 5, 2001, which is a continuation-in-part of International Application No. PCT/US01/06377, which designated the United States and was filed on Feb. 28, 2001, published in English, and is a continuation-in-part of U.S. application Ser. No. 09/795,668 filed Feb. 28, 2001, which is a continuation-in-part of U.S. application Ser. No. 09/515,716, filed Feb. 28, 2000. The entire teachings of the above applications are incorporated herein by reference.

### INCORPORATION BY REFERENCE OF MATERIAL ON COMPACT DISK

[0002] The compact disk having file name 23452004021.txt and comprising SEQ ID Nos: 1 through 1676, created Oct. 20, 2004 and being 2,756 KB in size, is hereby incorporated by reference in its entirety.

### BACKGROUND OF THE INVENTION

[0003] Schizophrenia is a devastating form of psychopathology, with a lifetime prevalence worldwide of 0.5%-1%. Twin and adoption studies suggest that both genetic and environmental factors influence susceptibility (see, e.g., Tsuang, M. T. et al., Schizophr. Res. 4(2):157-71 (1991); Tienari, P. J. and Wynne, L. C., Ann. Med. 26(4):233-7 (1994); Franzek, E. and Beckmann, H., Am. J. Psychiatry 155(1):76-83 (1998); Tsuang, M. T., J. Biomed. Sci. 5(1):28-30(1998)). Among first-degree relatives, the risk has been reported to vary from 6% in parents, to 10% in siblings, and to 13% in children of schizophrenic individuals; if one of the parents is also schizophrenic, the risk to siblings increases to 17%, and children of two schizophrenics have a risk of 46% of developing the illness (McGue, M. and Gottesmann, I. I., Eur. Arch. Psychiatry Clin. Neurosci 240:174-181 (1991); see also, e.g., Lim, L. C. and Sim, L. P., Singapore Med. J. 33(6):645-7 (1992)). The mode of transmission, however, remains uncertain.

[0004] Reports of suggestive linkage to several loci have been published, including loci on chromosomes 3, 5, 6, 8, 10, 13, 20, 22 and the X chromosome (see, e.g., for chromosomes 3p and 8p, Pulver, A. E., et al., Am. J. Med Genet. 60(4):252-60 (1995); for chromosomes 5q, 6p and 8p, Kendler, K. S. et al., Am. J. Med Genet. 88(1):29-33 (1999); for chromosomes 5q, 6p, 8p, 20p and 22q, Hovatta, I. et al., Mol. Psychiatry 3(5):452-7 (1998); for chromosome 6p, Schwab, S. G. et al., Nat. Genet. 11(3):325-7 (1995), Brzustowicz, L. M. et al., Am. J. Hum. Genet. 6 (6):1388-96 (1997) and Cao, Q. et al., Genomics 43(1):1-8 (1997); for chromosomes 6 and 8, Straub, R. E. et al., Cold Spring Harbor Symp. Quant. Biol 611:823-33 (1996); for chromosome 8, Kendler, K S. et al., Am. J. Psychiatry 153(12):1534-40 (1996); for chromosome 10, Straub, R. E. et al., Am. J. Med. Genet. 81(4):296-301 (1998) and Schwab, S. G. et al., Am. J. Med. Genet. 81(4):302-307 (1998); for chromosome 13, Lin, M. W. et al., Psyciatr. Genet. 5(3):117-26 (1995); Lin, M. W. et al., Hum. Genet. 99(3):417-420 (1997) and Blouin, J. L. et al., Nat. Genet. 20(1):70-73 (1993) (8 and 13); for chromosome 22, Gill, M. et al., Am. J. Med Genet. 67(1):40-45 (1996) and Bassett, A. S. et al., Am. J. Med. Genet. 81(4):328-37 (1998); and for the X chromosome, Milunsky, J. et al., Clin. Genet. 55(6):455-60 (1999)).

### SUMMARY OF THE INVENTION

[0005] The present invention relates to isolated nucleic acid molecules comprising the neuregulin 1 gene (NRG1). In one embodiment, the isolated nucleic acid molecule comprises a nucleotide sequence selected from the group consisting of SEQ ID NO: 1 and the complement of SEQ ID NO: 1. The invention further relates to a nucleic acid molecule which hybridizes under high stringency conditions to a nucleotide sequence selected from the group consisting of SEQ ID NO: 1 and the complement of SEQ ID NO: 1. The invention additionally relates to isolated nucleic acid molecules (e.g., cDNA molecules) encoding an NRG1 polypeptide (e.g., encoding any one of SEQ ID NO: 2-5 and 10-39, or another splicing variant of NRG1 polypeptide).

[0006] The invention further provides a method for assaying a sample for the presence of a nucleic acid molecule comprising all or a portion of NRG1 in a sample, comprising contacting said sample with a second nucleic acid molecule comprising a nucleotide sequence encoding an NRG1 polypeptide (e.g., SEQ ID NO: 1 or the complement of SEQ ID NO: 1; a nucleotide sequence encoding any one of SEQ ID NO: 2-5 or 10-39, or another splicing variant of NRG1 polypeptide), or a fragment or derivative thereof, under conditions appropriate for selective hybridization. The invention additionally provides a method for assaying a sample for the level of expression of an NRG1 polypeptide, or fragment or derivative thereof, comprising detecting (directly or indirectly) the level of expression of the NRG1 polypeptide, fragment or derivative thereof.

[0007] The invention also relates to a vector comprising an isolated nucleic acid molecule of the invention operatively linked to a regulatory sequence, as well as to a recombinant host cell comprising the vector. The invention also provides a method for preparing a polypeptide encoded by an isolated nucleic acid molecule described herein (an NRG1 polypeptide), comprising culturing a recombinant host cell of the invention under conditions suitable for expression of said nucleic acid molecule.

[0008] The invention further provides an isolated polypeptide encoded by isolated nucleic acid molecules of the invention (e.g., NRG1 polypeptide), as well as fragments or derivatives thereof. In a particular embodiment, the polypeptide comprises the amino acid sequence of any one of SEQ ID NO: 2-5 or 10-39. In another embodiment, the polypeptide is another splicing variant of an NRG1 polypeptide. The invention also relates to an isolated polypeptide comprising an amino acid sequence which is greater than about 90 percent identical to the amino acid sequence of any one of SEQ ID NO: 2-5 or 10-39.

[0009] The invention also relates to an antibody, or an antigen-binding fragment thereof, which selectively binds to a polypeptide of the invention, as well as to a method for assaying the presence of a polypeptide encoded by an isolated nucleic acid molecule of the invention in a sample, comprising contacting said sample with an antibody which specifically binds to the encoded polypeptide.

[0010] The invention further relates to methods of diagnosing a predisposition to schizophrenia. The methods of diagnosing a predisposition to schizophrenia in an individual include detecting the presence of a mutation in NRG1, as well as detecting alterations in expression of an NRG1 polypeptide, such as the presence of different splicing variants of NRG1 polypeptides. The alterations in expression can be quantitative, qualitative, or both quantitative and qualitative.

[0011] The invention also pertains to methods of diagnosing a susceptibility to schizophrenia in an individual, comprising screening for an at-risk haplotype in neuregulin 1 gene that is more frequently present in an individual susceptible to schizophrenia (affected), compared to the frequency of its presence in a healthy individual (control), wherein the presence of the haplotype is indicative of a susceptibility to schizophrenia.

[0012] The invention additionally relates to an assay for identifying agents which alter (e.g., enhance or inhibit) the activity or expression of one or more NRG1 polypeptides. For example, a cell, cellular fraction, or solution containing an NRG1 polypeptide or a fragment or derivative thereof, can be contacted with an agent to be tested, and the level of NRG1 polypeptide expression or activity can be assessed. The activity or expression of more than one NRG1 polypeptides can be assessed concurrently (e.g., the cell, cellular fraction, or solution can contain more than one type of NRG1 polypeptide, such as different splicing variants, and the levels of the different polypeptides or splicing variants can be assessed).

[0013] In another embodiment, the invention relates to assays to identify polypeptides which interact with one or more NRG1 polypeptides. In a yeast two-hybrid system, for example, a first vector is used which includes a nucleic acid encoding a DNA binding domain and also a nucleic acid encoding an NRG1 polypeptide, splicing variant, or fragment or derivative thereof, and a second vector is used which includes a nucleic acid encoding a transcription activation domain and also a nucleic acid encoding a polypeptide which potentially may interact with the NRG1 polypeptide, splicing variant, or fragment or derivative thereof (e.g., a NRG1 polypeptide binding agent or receptor). Incubation of yeast containing both the first vector and the second vector under appropriate conditions allows identification of polypeptides which interact with the NRG1 polypeptide or fragment or derivative thereof, and thus can be agents which alter the activity of expression of an NRG1 polypeptide.

[0014] Agents that enhance or inhibit NRG1 polypeptide expression or activity are also included in the current invention, as are methods of altering (enhancing or inhibiting) NRG1 polypeptide expression or activity by contacting a cell containing NRG1 and/or polypeptide, or by contacting the NRG1 polypeptide, with an agent that enhances or inhibits expression or activity of NRG1 polypeptide.

[0015] Additionally, the invention pertains to pharmaceutical compositions comprising the nucleic acids of the invention, the polypeptides of the invention, and/or the agents that alter activity of NRG1 polypeptide. The invention further pertains to methods of treating schizophrenia, by administering NRG1 therapeutic agents, such as nucleic acids of the invention, polypeptides of the invention, the agents that alter activity of NRG1 polypeptide, or compositions comprising the nucleic acids, polypeptides, and/or the agents that alter activity of NRG1 polypeptide.

[0016] The invention further relates to methods of assessing an agent of interest for neuroleptic activity, by administering the agent to a mouse that is hypomorphic for the neuregulin gene or for the ErbB4 gene and which exhibits abnormal behavior (e.g., hyperactivity, or alterations in social interaction or pre-pulse inhibition), and assessing the behavior of the mouse (e.g., by an open field test) in response to the agent to determine if there is a decrease in abnormal behavior, wherein a statistically significant decrease in abnormal behavior is associated with neuroleptic activity of the agent. Similarly, the invention also relates to methods for identifying a potential therapeutic agent for use in the treatment of schizophrenia, by administering an agent to a mouse that is hypomorphic for the neuregulin gene or for the ErbB4 gene and which exhibits abnormal behavior, and assessing the behavior of the mouse in response to the agent to determine if there is a decrease in abnormal behavior, wherein a statistically significant decrease in abnormal behavior indicates that the agent is a potential therapeutic agent for use in the treatment of schizophrenia.

### BRIEF DESCRIPTION OF THE DRAWINGS

[0017] FIG. 1 is a graphic representation of the nonparametric multipoint LOD score for the schizophrenia locus on 8p21-p12.

[0018] FIGS. 2A-2F depicts haplotypes found in individuals affected with schizophrenia. Portions which are found in multiple haplotypes are depicted by backward slashes.

[0019] FIG. 3 depicts the order of sequenced BACS and boundaries for at-risk haplotypes for schizophrenia at locus 8p12.

[0020] FIG. 4 depicts the exons, single nucleotide polymorphisms (SNPs), and exons of neuregulin 1 at locus 8p12. Cylinders, screened for mutations; N, new exons; open stars, SNPs (coding); filled stars, SNPs (untranslated); open circles, 5′ exons; filled circles, 3′ exons; lines, genomic neighbors.

[0021] FIG. 5 shows extensive sharing of two microsatellite haplotypes (Gudbjartsson et al., Nature Genet. 25, 12 (2000)) between patients from the linkage families (shown at the top). Key markers in the haplotypes are shown and the size of the region is indicated. Families carrying the haplotypes are labeled F1-F9 and the number of affected individuals in each family carrying that haplotype is given in parentheses. Maximum haplotype sharing between families is 9.5 Mb for haplotype I and 11.4 Mb for haplotype II. Shared haplotypes between families narrow the region of interest down to a 600 kb region between markers 29H12-7320 and 473C15-439, indicated by a bar. Location of a BAC contig covering 1.5 Mb of the locus region is indicated. The sequence of GS1-57G24 was obtained from the public domain but we sequenced the other BACs shown. Exons are indicated by vertical bars.

[0022] FIG. 6 shows four haplotypes, defined by 12 SNPs and 4 microsatellite markers, were individually found in excess in the schizophrenia patients with similar relative risk. The common core for these haplotypes, defined by 5 SNPs and 2 microsatellite markers, is shown at the bottom. The frequency for each haplotype in all affected individuals, independent affected individuals and controls is indicated in the panel on the right. The distance between the markers flanking possible recombination breakpoints (arrows) is 290 kb.

[0023] FIGS. 7A and 7B are graphs showing that NRG1TM and ErbB4 hypomorphic mice were significantly more active according to different measures that reflect locomotion and exploration. Here we show distance travelled in an open field test for the two lines of mice. FIG. 7A shows NRG1TM hypomorphic mice and FIG. 7B shows ErbB4 hypomorphic mice. Data has been binned into 5 min intervals over the 30 min observation period. Distance traveled was significantly increased in both NRG1TM and ErbB4 male mice in comparison to litter-mate controls (N=21 NRG1TM mice and 22 litter-mate controls, P=0.035; N=39 ErbB4 mice and 22 litter-mate controls, P=0.027). Open field activity was monitored. Error bars indicate the standard error of the mean (±SEM).

[0024] FIG. 8 shows increased locomotor activity in the NRG1TM mice that partly mimics the PCP induced phenotype in mice was ameliorated by clozapine. The NRG1TM mice and litter-mate controls were injected i.p. with either clozapine (1 mg/kg) or vehicle 25 min prior to testing (N=10 NRG1TM mice and 10 controls, P=0.018). Open field activity was monitored. Error bars indicate the standard error of the mean (±SEM).

[0025] FIGS. 9A to 9E are a table identifying splice variants for Neuregulin 1. FIGS. 9A and 9B show mRNA/cDNA variants. FIGS. 9C, 9D and 9E show novel cDNA variants.

### DETAILED DESCRIPTION OF THE INVENTION

[0026] As described herein, Applicants have used linkage and haplotype analyses to identify a disease susceptibility gene for schizophrenia residing in a 1.5 Mb segment on chromosome 8p12. The gene is neuregulin 1 gene (NRG1). The full sequence of the neuregulin 1 gene is shown in SEQ ID NO: 1. Microsatellite markers and single nucleotide polymorphisms (SNPs) in the sequence are shown in Tables 2 and 3 Table 4 shows the splice variants for neuregulin 1 exons.

Nucleic Acids of the Invention

[0027] Accordingly, the invention pertains to an isolated nucleic acid molecule comprising the mammalian (e.g., primate or human) neuregulin 1 gene (NRG1). The term, “NRG1,” as used herein, refers to an isolated nucleic acid molecule in the 8p21-p12 locus, which is associated with a susceptibility to schizophrenia, and also to an isolated nucleic acid molecule (e.g., cDNA or the gene) that encodes an NRG1 polypeptide (e.g., the polypeptide having any one of SEQ ID NO:2-5 or 10-39, or another splicing variant of an NRG1 polypeptide). In a preferred embodiment, the isolated nucleic acid molecule comprises SEQ ID NO: 1 or the complement of SEQ ID NO: 1. In another preferred embodiment, the isolate nucleic acid molecule comprises the sequence of SEQ ID NO: 1 or the complement of SEQ ID NO: 1, except that one or more single nucleotide polymorphisms as shown in Tables 2 and 3 are also present.

[0028] The isolated nucleic acid molecules of the present invention can be RNA, for example, mRNA, or DNA, such as cDNA and genomic DNA. A “neuregulin 1 nucleic acid” (“NRG 1-nucleic acid”), as used herein, refers to a nucleic acid molecule (RNA, mRNA, cDNA, or genomic DNA, either single- or double-stranded) encoding NRG1. DNA molecules can be double-stranded or single-stranded; single stranded RNA or DNA can be either the coding, or sense, strand or the non-coding, or antisense, strand. The nucleic acid molecule can include all or a portion of the coding sequence of the gene and can further comprise additional non-coding sequences such as introns and non-coding 3′ and 5′ sequences (including regulatory sequences, for example). Additionally, the nucleic acid molecule can be fused to a marker sequence, for example, a sequence that encodes a polypeptide to assist in isolation or purification of the polypeptide. Such sequences include, but are not limited to, those which encode a glutathione-S-transferase (GST) fusion protein and those which encode a hemagglutinin A (HA) polypeptide marker from influenza.

[0029] An “isolated” nucleic acid molecule, as used herein, is one that is separated from nucleic acids which normally flank the gene or nucleotide sequence (as in genomic sequences) and/or has been completely or partially purified from other transcribed sequences (e.g., as in an RNA library). For example, an isolated nucleic acid of the invention may be substantially isolated with respect to the complex cellular milieu in which it naturally occurs, or culture medium when produced by recombinant techniques, or chemical precursors or other chemicals when chemically synthesized. In some instances, the isolated material will form part of a composition (for example, a crude extract containing other substances), buffer system or reagent mix. In other circumstances, the material may be purified to essential homogeneity, for example as determined by PAGE or column chromatography such as HPLC. Preferably, an isolated nucleic acid molecule comprises at least about 50, 80 or 90% (on a molar basis) of all macromolecular species present. With regard to genomic DNA, the term “isolated” also can refer to nucleic acid molecules which are separated from the chromosome with which the genomic DNA is naturally associated. For example, the isolated nucleic acid molecule can contain less than about 5 kb, 4 kb, 3 kb, 2 kb, 1 kb, 0.5 kb or 0.1 kb of nucleotides which flank the nucleic acid molecule in the genomic DNA of the cell from which the nucleic acid molecule is derived.

[0030] The nucleic acid molecule can be fused to other coding or regulatory sequences and still be considered isolated. Thus, recombinant DNA contained in a vector is included in the definition of “isolated” as used herein. Also, isolated nucleic acid molecules include recombinant DNA molecules in heterologous host cells, as well as partially or substantially purified DNA molecules in solution. “Isolated” nucleic acid molecules also encompass in vivo and in vitro RNA transcripts of the DNA molecules of the present invention. An isolated nucleic acid molecule or nucleotide sequence can include a nucleic acid molecule or nucleotide sequence which is synthesized chemically or by recombinant means. Therefore, recombinant DNA contained in a vector are included in the definition of “isolated” as used herein. Also, isolated nucleotide sequences include recombinant DNA molecules in heterologous organisms, as well as partially or substantially purified DNA molecules in solution. In vivo and in vitro RNA transcripts of the DNA molecules of the present invention are also encompassed by “isolated” nucleotide sequences. Such isolated nucleotide sequences are useful in the manufacture of the encoded polypeptide, as probes for isolating homologous sequences (e.g., from other mammalian species), for gene mapping (e.g., by in situ hybridization with chromosomes), or for detecting expression of the gene in tissue (e.g., human tissue), such as by Northern blot analysis.

[0031] The present invention also pertains to variant nucleic acid molecules which are not necessarily found in nature but which encode an NRG1 polypeptide (e.g., a polypeptide having the amino acid sequence of any one of SEQ ID NO:2-5 or 10-39, or another splicing variant of NRG1 polypeptide). Thus, for example, DNA molecules which comprise a sequence that is different from the naturally-occurring nucleotide sequence but which, due to the degeneracy of the genetic code, encode an NRG1 polypeptide of the present invention are also the subject of this invention. The invention also encompasses nucleotide sequences encoding portions (fragments), or encoding variant polypeptides such as analogues or derivatives of the NRG1 polypeptide. Such variants (also referred to herein as “derivatives”) can be naturally-occurring, such as in the case of allelic variation or single nucleotide polymorphisms, or non-naturally-occurring, such as those induced by various mutagens and mutagenic processes. Intended variations include, but are not limited to, addition, deletion and substitution of one or more nucleotides which can result in conservative or non-conservative amino acid changes, including additions and deletions. Preferably the nucleotide (and/or resultant amino acid) changes are silent or conserved; that is, they do not alter the characteristics or activity of the NRG1 polypeptide. In one preferred embodiment, the nucleotide sequences are fragments that comprise one or more polymorphic microsatellite markers (e.g., as shown in Tables 2 and 3). In another preferred embodiment, the nucleotide sequences are fragments that comprise one or more single nucleotide polymorphisms in NRG1 (e.g., as shown in Tables 2 and 3).

[0032] Other alterations of the nucleic acid molecules of the invention can include, for example, labelling, methylation, internucleotide modifications such as uncharged linkages (e.g., methyl phosphonates, phosphotriesters, phosphoamidates, carbamates), charged linkages (e.g., phosphorothioates, phosphorodithioates), pendent moieties (e.g., polypeptides), intercalators (e.g., acridine, psoralen), chelators, alkylators, and modified linkages (e.g., alpha anomeric nucleic acids). Also included are synthetic molecules that mimic nucleic acid molecules in the ability to bind to a designated sequences via hydrogen bonding and other chemical interactions. Such molecules include, for example, those in which peptide linkages substitute for phosphate linkages in the backbone of the molecule.

[0033] The invention also pertains to nucleic acid molecules which hybridize under high stringency hybridization conditions, such as for selective hybridization, to a nucleotide sequence described herein (e.g., nucleic acid molecules which specifically hybridize to a nucleotide sequence encoding polypeptides described herein, and, optionally, have an activity of the polypeptide). In one embodiment, the invention includes variants described herein which hybridize under high stringency hybridization conditions (e.g., for selective hybridization) to a nucleotide sequence comprising a nucleotide sequence selected from SEQ ID NO: 1 or the complement of SEQ ID NO: 1. In another embodiment, the invention includes variants described herein which hybridize under high stringency hybridization conditions (e.g., for selective hybridization) to a nucleotide sequence encoding an amino acid sequence selected from SEQ ID NO: 2-5 and 10-39. In a preferred embodiment, the variant which hybridizes under high stringency hybridizations has an activity of NRG1 (e.g., binding activity).

[0034] Such nucleic acid molecules can be detected and/or isolated by specific hybridization (e.g., under high stringency conditions). “Specific hybridization,” as used herein, refers to the ability of a first nucleic acid to hybridize to a second nucleic acid in a manner such that the first nucleic acid does not hybridize to any nucleic acid other than to the second nucleic acid (e.g., when the first nucleic acid has a higher similarity to the second nucleic acid than to any other nucleic acid in a sample wherein the hybridization is to be performed). “Stringency conditions” for hybridization is a term of art which refers to the incubation and wash conditions, e.g., conditions of temperature and buffer concentration, which permit hybridization of a particular nucleic acid to a second nucleic acid; the first nucleic acid may be perfectly (i.e., 100%) complementary to the second, or the first and second may share some degree of complementarity which is less than perfect (e.g., 70%, 75%, 85%, 90%, 95%). For example, certain high stringency conditions can be used which distinguish perfectly complementary nucleic acids from those of less complementarity. “High stringency conditions”, “moderate stringency conditions” and “low stringency conditions” for nucleic acid hybridizations are explained on pages 2.10.1-2.10.16 and pages 6.3.1-6.3.6 in Current Protocols in Molecular Biology (Ausubel, F. M. et al., “Current Protocols in Molecular Biology”, John Wiley & Sons, (1998), the entire teachings of which are incorporated by reference herein). The exact conditions which determine the stringency of hybridization depend not only on ionic strength (e.g., 0.2×SSC, 0.1×SSC), temperature (e.g., room temperature, 42° C., 68° C.) and the concentration of destabilizing agents such as formamide or denaturing agents such as SDS, but also on factors such as the length of the nucleic acid sequence, base composition, percent mismatch between hybridizing sequences and the frequency of occurrence of subsets of that sequence within other non-identical sequences. Thus, equivalent conditions can be determined by varying one or more of these parameters while maintaining a similar degree of identity or similarity between the two nucleic acid molecules. Typically, conditions are used such that sequences at least about 60%, at least about 70%, at least about 80%, at least about 90% or at least about 95% or more identical to each other remain hybridized to one another. By varying hybridization conditions from a level of stringency at which no hybridization occurs to a level at which hybridization is first observed, conditions which will allow a given sequence to hybridize (e.g., selectively) with the most similar sequences in the sample can be determined.

[0035] Exemplary conditions are described in Krause, M. H. and S. A. Aaronson, Methods in Enzymology, 200:546-556 (1991). Also, in, Ausubel, et al., “Current Protocols in Molecular Biology”, John Wiley & Sons, (1998), which describes the determination of washing conditions for moderate or low stringency conditions. Washing is the step in which conditions are usually set so as to determine a minimum level of complementarity of the hybrids. Generally, starting from the lowest temperature at which only homologous hybridization occurs, each ° C. by which the final wash temperature is reduced (holding SSC concentration constant) allows an increase by 1% in the maximum extent of mismatching among the sequences that hybridize. Generally, doubling the concentration of SSC results in an increase in Tₘ of −17° C. Using these guidelines, the washing temperature can be determined empirically for high, moderate or low stringency, depending on the level of mismatch sought.

[0036] For example, a low stringency wash can comprise washing in a solution containing 0.2×SSC/0.1% SDS for 10 min at room temperature; a moderate stringency wash can comprise washing in a prewarmed solution (42° C.) solution containing 0.2×SSC/0.1% SDS for 15 min at 42° C.; and a high stringency wash can comprise washing in prewarmed (68° C.) solution containing 0.1×SSC/0.1% SDS for 15 min at 68° C. Furthermore, washes can be performed repeatedly or sequentially to obtain a desired result as known in the art. Equivalent conditions can be determined by varying one or more of the parameters given as an example, as known in the art, while maintaining a similar degree of identity or similarity between the target nucleic acid molecule and the primer or probe used.

[0037] The percent identity of two nucleotide or amino acid sequences can be determined by aligning the sequences for optimal comparison purposes (e.g., gaps can be introduced in the sequence of a first sequence). The nucleotides or amino acids at corresponding positions are then compared, and the percent identity between the two sequences is a function of the number of identical positions shared by the sequences (i.e., % identity=# of identical positions/total # of positions×100). In certain embodiments, the length of a sequence aligned for comparison purposes is at least 30%, preferably at least 40%, more preferably at least 60%, and even more preferably at least 70%, 80% or 90% of the length of the reference sequence. The actual comparison of the two sequences can be accomplished by well-known methods, for example, using a mathematical algorithm. A preferred, non-limiting example of such a mathematical algorithm is described in Karlin et al., Proc. Natl. Acad. Sci. USA, 90:5873-5877 (1993). Such an algorithm is incorporated into the NBLAST and XBLAST programs (version 2.0) as described in Altschul et al., Nucleic Acids Res., 25:389-3402 (1997). When utilizing BLAST and Gapped BLAST programs, the default parameters of the respective programs (e.g., NBLAST) can be used. In one embodiment, parameters for sequence comparison can be set at score=100, wordlength=12, or can be varied (e.g., W=5 or W=20).

[0038] Another preferred, non-limiting example of a mathematical algorithm utilized for the comparison of sequences is the algorithm of Myers and Miller, CABIOS (1989). Such an algorithm is incorporated into the ALIGN program (version 2.0) which is part of the GCG sequence alignment software package. When utilizing the ALIGN program for comparing amino acid sequences, a PAM120 weight residue table, a gap length penalty of 12, and a gap penalty of 4 can be used. Additional algorithms for sequence analysis are known in the art and include ADVANCE and ADAM as described in Torellis and Robotti (1994) Comput. Appl. Biosci., 10:3-5; and FASTA described in Pearson and Lipman (1988) PNAS, 85:2444-8.

[0039] In another embodiment, the percent identity between two amino acid sequences can be accomplished using the GAP program in the GCG software package (Accelrys, Cambridge, UK) using either a Blossom 63 matrix or a PAM250 matrix, and a gap weight of 12, 10, 8, 6, or 4 and a length weight of 2, 3, or 4. In yet another embodiment, the percent identity between two nucleic acid sequences can be accomplished using the GAP program in the GCG software package, using a gap weight of 50 and a length weight of 3.

[0040] The present invention also provides isolated nucleic acid molecules that contain a fragment or portion that hybridizes under highly stringent conditions to a nucleotide sequence comprising a nucleotide sequence selected from SEQ ID NO: 1 and the complement of SEQ ID NO: 1, and also provides isolated nucleic acid molecules that contain a fragment or portion that hybridizes under highly stringent conditions to a nucleotide sequence encoding an amino acid sequence selected from SEQ ID NO: 2-5 and 10-39, inclusive. The nucleic acid fragments of the invention are at least about 15, preferably at least about 18, 20, 23 or 25 nucleotides, and can be 30, 40, 50, 100, 200 or more nucleotides in length. Longer fragments, for example, 30 or more nucleotides in length, which encode antigenic polypeptides described herein are particularly useful, such as for the generation of antibodies as described below.

[0041] In a related aspect, the nucleic acid fragments of the invention are used as probes or primers in assays such as those described herein. “Probes” or “primers” are oligonucleotides that hybridize in a base-specific manner to a complementary strand of nucleic acid molecules. Such probes and primers include polypeptide nucleic acids, as described in Nielsen et al., Science, 254, 1497-1500 (1991). As also used herein, the term “primer” in particular refers to a single-stranded oligonucleotide which acts as a point of initiation of template-directed DNA synthesis using well-known methods (e.g., PCR, LCR) including, but not limited to those described herein.

[0042] Typically, a probe or primer comprises a region of nucleotide sequence that hybridizes to at least about 15, typically about 20-25, and more typically about 40, 50 or 75, consecutive nucleotides of a nucleic acid molecule comprising a contiguous nucleotide sequence selected from: SEQ ID NO: 1, the complement of SEQ ID NO: 1, or a sequence encoding an amino acid sequence selected from SEQ ID NO: 2-5 and 10-39. In preferred embodiments, a probe or primer comprises 100 or fewer nucleotides, preferably from 6 to 50 nucleotides, preferably from 12 to 30 nucleotides. In other embodiments, the probe or primer is at least 70% identical to the contiguous nucleotide sequence or to the complement of the contiguous nucleotide sequence, preferably at least 80% identical, more preferably at least 90% identical, even more preferably at least 95% identical, or even capable of selectively hybridizing to the contiguous nucleotide sequence or to the complement of the contiguous nucleotide sequence. Often, the probe or primer further comprises a label, e.g., radioisotope, fluorescent compound, enzyme, or enzyme co-factor.

[0043] Representative oligonucleotides useful as probes or primers include the microsatellite markers shown in Tables 2, 3 and 4.

[0044] The nucleic acid molecules of the invention such as those described above can be identified and isolated using standard molecular biology techniques and the sequence information provided in SEQ ID NO: 1, and/or 2-5 and 10-39. For example, nucleic acid molecules can be amplified and isolated by the polymerase chain reaction using synthetic oligonucleotide primers designed based on one or more of the sequences provided in SEQ ID NO: 1 and/or the complement of SEQ ID NO: 1, or designed based on nucleotides based on sequences encoding one or more of the amino acid sequences provided in any one or more of SEQ ID NO: 2-5 and 10-39. See generally PCR Technology: Principles and Applications for DNA Amplification (ed. H. A. Erlich, Freeman Press, NY, N.Y., 1992); PCR Protocols: A Guide to Methods and Applications (Eds. Innis, et al., Academic Press, San Diego, Calif., 1990); Mattila et al., Nucleic Acids Res., 19:4967 (1991); Eckert et al., PCR Methods and Applications, 1:17 (1991); PCR (eds. McPherson et al., IRL Press, Oxford); and U.S. Pat. No. 4,683,202. The nucleic acid molecules can be amplified using cDNA, mRNA or genomic DNA as a template, cloned into an appropriate vector and characterized by DNA sequence analysis.

[0045] Other suitable amplification methods include the ligase chain reaction (LCR) (see Wu and Wallace, Genomics, 4:560 (1989), Landegren et al., Science, 241:1077 (1988), transcription amplification (Kwoh et al., Proc. Natl. Acad. Sci. USA, 86:1173 (1989)), and self-sustained sequence replication (Guatelli et al., Proc. Nat. Acad. Sci. USA, 87:1874 (1990)) and nucleic acid based sequence amplification (NASBA). The latter two amplification methods involve isothermal reactions based on isothermal transcription, which produce both single stranded RNA (ssRNA) and double stranded DNA (dsDNA) as the amplification products in a ratio of about 30 or 100 to 1, respectively.

[0046] The amplified DNA can be radiolabelled and used as a probe for screening a cDNA library derived from human cells, mRNA in zap express, ZIPLOX or other suitable vector. Corresponding clones can be isolated, DNA can obtained following in vivo excision, and the cloned insert can be sequenced in either or both orientations by art recognized methods to identify the correct reading frame encoding a polypeptide of the appropriate molecular weight. For example, the direct analysis of the nucleotide sequence of nucleic acid molecules of the present invention can be accomplished using well-known methods that are commercially available. See, for example, Sambrook et al., Molecular Cloning, A Laboratory Manual (2nd Ed., CSHP, New York 1989); Zyskind et al., Recombinant DNA Laboratory Manual, (Acad. Press, 1988). Using these or similar methods, the polypeptide and the DNA encoding the polypeptide can be isolated, sequenced and further characterized.

[0047] Antisense nucleic acid molecules of the invention can be designed using the nucleotide sequences of SEQ ID NO: 1 and/or the complement of SEQ ID NO: 1, and/or a portion of SEQ ID NO: 1 or the complement of SEQ ID NO: 1, and/or a sequence encoding the amino acid sequence of any one or more of SEQ ID NO: 2-5 or 10-39, or encoding a portion of any one or more of SEQ ID NO: 2-5 or 10-39, and constructed using chemical synthesis and enzymatic ligation reactions using procedures known in the art. For example, an antisense nucleic acid molecule (e.g., an antisense oligonucleotide) can be chemically synthesized using naturally occurring nucleotides or variously modified nucleotides designed to increase the biological stability of the molecules or to increase the physical stability of the duplex formed between the antisense and sense nucleic acids, e.g., phosphorothioate derivatives and acridine substituted nucleotides can be used. Alternatively, the antisense nucleic acid molecule can be produced biologically using an expression vector into which a nucleic acid molecule has been subcloned in an antisense orientation (i.e., RNA transcribed from the inserted nucleic acid molecule will be of an antisense orientation to a target nucleic acid of interest).

[0048] In general, the isolated nucleic acid sequences of the invention can be used as molecular weight markers on Southern gels, and as chromosome markers which are labeled to map related gene positions. The nucleic acid sequences can also be used to compare with endogenous DNA sequences in patients to identify genetic disorders (e.g., a predisposition for or susceptibility to schizophrenia), and as probes, such as to hybridize and discover related DNA sequences or to subtract out known sequences from a sample. The nucleic acid sequences can further be used to derive primers for genetic fingerprinting, to raise anti-polypeptide antibodies using DNA immunization techniques, and as an antigen to raise anti-DNA antibodies or elicit immune responses. Portions or fragments of the nucleotide sequences identified herein (and the corresponding complete gene sequences) can be used in numerous ways as polynucleotide reagents. For example, these sequences can be used to: (i) map their respective genes on a chromosome; and, thus, locate gene regions associated with genetic disease; (ii) identify an individual from a minute biological sample (tissue typing); and (iii) aid in forensic identification of a biological sample. Additionally, the nucleotide sequences of the invention can be used to identify and express recombinant polypeptides for analysis, characterization or therapeutic use, or as markers for tissues in which the corresponding polypeptide is expressed, either constitutively, during tissue differentiation, or in diseased states. The nucleic acid sequences can additionally be used as reagents in the screening and/or diagnostic assays described herein, and can also be included as components of kits (e.g., reagent kits) for use in the screening and/or diagnostic assays described herein.

[0049] Another aspect of the invention pertains to nucleic acid constructs containing a nucleic acid molecule selected from the group consisting of SEQ ID NO: 1 and the complement of SEQ ID NO: 1 (or a portion thereof). Yet another aspect of the invention pertains to nucleic acid constructs containing a nucleic acid molecule encoding the amino acid sequence of any one of SEQ ID NO: 2-5 or 10-39. The constructs comprise a vector (e.g., an expression vector) into which a sequence of the invention has been inserted in a sense or antisense orientation. As used herein, the term “vector” refers to a nucleic acid molecule capable of transporting another nucleic acid to which it has been linked. One type of vector is a “plasmid”, which refers to a circular double stranded DNA loop into which additional DNA segments can be ligated. Another type of vector is a viral vector, wherein additional DNA segments can be ligated into the viral genome. Certain vectors are capable of autonomous replication in a host cell into which they are introduced (e.g., bacterial vectors having a bacterial origin of replication and episomal mammalian vectors). Other vectors (e.g., non-episomal mammalian vectors) are integrated into the genome of a host cell upon introduction into the host cell, and thereby are replicated along with the host genome. Moreover, certain vectors, expression vectors, are capable of directing the expression of genes to which they are operably linked. In general, expression vectors of utility in recombinant DNA techniques are often in the form of plasmids. However, the invention is intended to include such other forms of expression vectors, such as viral vectors (e.g., replication defective retroviruses, adenoviruses and adeno-associated viruses) that serve equivalent functions.

[0050] Preferred recombinant expression vectors of the invention comprise a nucleic acid molecule of the invention in a form suitable for expression of the nucleic acid molecule in a host cell. This means that the recombinant expression vectors include one or more regulatory sequences, selected on the basis of the host cells to be used for expression, which is operably linked to the nucleic acid sequence to be expressed. Within a recombinant expression vector, “operably linked” is intended to mean that the nucleotide sequence of interest is linked to the regulatory sequence(s) in a manner which allows for expression of the nucleotide sequence (e.g., in an in vitro transcription/translation system or in a host cell when the vector is introduced into the host cell). The term “regulatory sequence” is intended to include promoters, enhancers and other expression control elements (e.g., polyadenylation signals). Such regulatory sequences are described, for example, in Goeddel, Gene Expression Technology: Methods in Enzymology 185, Academic Press, San Diego, Calif. (1990). Regulatory sequences include those which direct constitutive expression of a nucleotide sequence in many types of host cell and those which direct expression of the nucleotide sequence only in certain host cells (e.g., tissue-specific regulatory sequences). It will be appreciated by those skilled in the art that the design of the expression vector can depend on such factors as the choice of the host cell to be transformed and the level of expression of polypeptide desired. The expression vectors of the invention can be introduced into host cells to thereby produce polypeptides, including fusion polypeptides, encoded by nucleic acid molecules as described herein.

[0051] The recombinant expression vectors of the invention can be designed for expression of a polypeptide of the invention in prokaryotic or eukaryotic cells, e.g., bacterial cells such as E. coli, insect cells (using baculovirus expression vectors), yeast cells or mammalian cells. Suitable host cells are discussed further in Goeddel, supra. Alternatively, the recombinant expression vector can be transcribed and translated in vitro, for example using T7 promoter regulatory sequences and T7 polymerase.

[0052] Another aspect of the invention pertains to host cells into which a recombinant expression vector of the invention has been introduced. The terms “host cell” and “recombinant host cell” are used interchangeably herein. It is understood that such terms refer not only to the particular subject cell but also to the progeny or potential progeny of such a cell. Because certain modifications may occur in succeeding generations due to either mutation or environmental influences, such progeny may not, in fact, be identical to the parent cell, but are still included within the scope of the term as used herein.

[0053] A host cell can be any prokaryotic or eukaryotic cell. For example, a nucleic acid molecule of the invention can be expressed in bacterial cells (e.g., E. coli), insect cells, yeast or mammalian cells (such as Chinese hamster ovary cells (CHO) or COS cells). Other suitable host cells are known to those skilled in the art.

[0054] Vector DNA can be introduced into prokaryotic or eukaryotic cells via conventional transformation or transfection techniques. As used herein, the terms “transformation” and “transfection” are intended to refer to a variety of art-recognized techniques for introducing a foreign nucleic acid molecule (e.g., DNA) into a host cell, including calcium phosphate or calcium chloride co-precipitation, DEAE-dextran-mediated transfection, lipofection, or electroporation. Suitable methods for transforming or transfecting host cells can be found in Sambrook, et al. (supra), and other laboratory manuals.

[0055] For stable transfection of mammalian cells, it is known that, depending upon the expression vector and transfection technique used, only a small fraction of cells may integrate the foreign DNA into their genome. In order to identify and select these integrants, a gene that encodes a selectable marker (e.g., for resistance to antibiotics) is generally introduced into the host cells along with the gene of interest. Preferred selectable markers include those that confer resistance to drugs, such as G418, hygromycin and methotrexate. Nucleic acid molecules encoding a selectable marker can be introduced into a host cell on the same vector as the nucleic acid molecule of the invention or can be introduced on a separate vector. Cells stably transfected with the introduced nucleic acid molecule can be identified by drug selection (e.g., cells that have incorporated the selectable marker gene will survive, while the other cells die).

[0056] A host cell of the invention, such as a prokaryotic or eukaryotic host cell in culture, can be used to produce (i.e., express) a polypeptide of the invention. Accordingly, the invention further provides methods for producing a polypeptide using the host cells of the invention. In one embodiment, the method comprises culturing the host cell of invention (into which a recombinant expression vector encoding a polypeptide of the invention has been introduced) in a suitable medium such that the polypeptide is produced. In another embodiment, the method further comprises isolating the polypeptide from the medium or the host cell.

[0057] The host cells of the invention can also be used to produce nonhuman transgenic animals. For example, in one embodiment, a host cell of the invention is a fertilized oocyte or an embryonic stem cell into which a nucleic acid molecule of the invention (e.g, an exogenous neuregulin 1 gene, or an exogenous nucleic acid encoding an NRG1 polypeptide) has been introduced. Such host cells can then be used to create non-human transgenic animals in which exogenous nucleotide sequences have been introduced into the genome or homologous recombinant animals in which endogenous nucleotide sequences have been altered. Such animals are useful for studying the function and/or activity of the nucleotide sequence and polypeptide encoded by the sequence and for identifying and/or evaluating modulators of their activity. As used herein, a “transgenic animal” is a non-human animal, preferably a mammal, more preferably a rodent such as a rat or mouse, in which one or more of the cells of the animal includes a transgene. Other examples of transgenic animals include non-human primates, sheep, dogs, cows, goats, chickens and amphibians. A transgene is exogenous DNA which is integrated into the genome of a cell from which a transgenic animal develops and which remains in the genome of the mature animal, thereby directing the expression of an encoded gene product in one or more cell types or tissues of the transgenic animal. As used herein, an “homologous recombinant animal” is a non-human animal, preferably a mammal, more preferably a mouse, in which an endogenous gene has been altered by homologous recombination between the endogenous gene and an exogenous DNA molecule introduced into a cell of the animal, e.g., an embryonic cell of the animal, prior to development of the animal.

[0058] Methods for generating transgenic animals via embryo manipulation and microinjection, particularly animals such as mice, have become conventional in the art and are described, for example, in U.S. Pat. Nos. 4,736,866 and 4,870,009, U.S. Pat. No. 4,873,191 and in Hogan, Manipulating the Mouse Embryo (Cold Spring Harbor Laboratory Press, Cold Spring Harbor, N.Y., 1986). Methods for constructing homologous recombination vectors and homologous recombinant animals are described further in Bradley (1991) Current Opinion in Bio/Technology, 2:823-829 and in PCT Publication Nos. WO 90/11354, WO 91/01140, WO 92/0968, and WO 93/04169. Clones of the non-human transgenic animals described herein can also be produced according to the methods described in Wilmut et al. (1997) Nature, 385:810-813 and PCT Publication Nos. WO 97/07668 and WO 97/07669.

Polypeptides of the Invention

[0059] The present invention also pertains to isolated polypeptides encoded by NRG1 (“NRG1 polypeptides”), and fragments and variants thereof, as well as polypeptides encoded by nucleotide sequences described herein (e.g., other splicing variants). The term “polypeptide” refers to a polymer of amino acids, and not to a specific length; thus, peptides, oligopeptides and proteins are included within the definition of a polypeptide. As used herein, a polypeptide is said to be “isolated” or “purified” when it is substantially free of cellular material when it is isolated from recombinant and non-recombinant cells, or free of chemical precursors or other chemicals when it is chemically synthesized. A polypeptide, however, can be joined to another polypeptide with which it is not normally associated in a cell (e.g., in a “fusion protein”) and still be “isolated” or “purified.”

[0060] The polypeptides of the invention can be purified to homogeneity. It is understood, however, that preparations in which the polypeptide is not purified to homogeneity are useful. The critical feature is that the preparation allows for the desired function of the polypeptide, even in the presence of considerable amounts of other components. Thus, the invention encompasses various degrees of purity. In one embodiment, the language “substantially free of cellular material” includes preparations of the polypeptide having less than about 30% (by dry weight) other proteins (i.e., contaminating protein), less than about 20% other proteins, less than about 10% other proteins, or less than about 5% other proteins.

[0061] When a polypeptide is recombinantly produced, it can also be substantially free of culture medium, i.e., culture medium represents less than about 20%, less than about 10%, or less than about 5% of the volume of the polypeptide preparation. The language “substantially free of chemical precursors or other chemicals” includes preparations of the polypeptide in which it is separated from chemical precursors or other chemicals that are involved in its synthesis. In one embodiment, the language “substantially free of chemical precursors or other chemicals” includes preparations of the polypeptide having less than about 30% (by dry weight) chemical precursors or other chemicals, less than about 20% chemical precursors or other chemicals, less than about 10% chemical precursors or other chemicals, or less than about 5% chemical precursors or other chemicals.

[0062] In one embodiment, a polypeptide of the invention comprises an amino acid sequence encoded by a nucleic acid molecule comprising a nucleotide sequence selected from the group consisting of SEQ ID NO: 1 and complements and portions thereof, e.g., any one of SEQ ID NO: 2-5 or 10-39, or a portion of any one of SEQ ID NO: 2-5 or 10-39.

[0063] The polypeptides of the invention also encompass fragments and sequence variants. Variants include a substantially homologous polypeptide encoded by the same genetic locus in an organism, i.e., an allelic variant, as well as other splicing variants. Variants also encompass polypeptides derived from other genetic loci in an organism, but having substantial homology to a polypeptide encoded by a nucleic acid molecule comprising a nucleotide sequence selected from the group consisting of SEQ ID NO: 1 and complements and portions thereof, or having substantial homology to a polypeptide encoded by a nucleic acid molecule comprising a nucleotide sequence selected from the group consisting of nucleotide sequences encoding any one of SEQ ID NO: 2-5 or 10-39. Variants also include polypeptides substantially homologous or identical to these polypeptides but derived from another organism, i.e., an ortholog. Variants also include polypeptides that are substantially homologous or identical to these polypeptides that are produced by chemical synthesis. Variants also include polypeptides that are substantially homologous or identical to these polypeptides that are produced by recombinant methods.

[0064] As used herein, two polypeptides (or a region of the polypeptides) are substantially homologous or identical when the amino acid sequences are at least about 45-55%, typically at least about 70-75%, more typically at least about 80-85%, and most typically greater than about 90% or more homologous or identical. A substantially homologous amino acid sequence, according to the present invention, will be encoded by a nucleic acid molecule hybridizing to SEQ ID NO: 1, or portion thereof, under stringent conditions as more particularly described above, or will be encoded by a nucleic acid molecule hybridizing to a nucleic acid sequence encoding any one of SEQ ID NO: 2-5 or 10-39, or portion thereof, under stringent conditions as more particularly described thereof.

[0065] To determine the percent homology or identity of two amino acid sequences, or of two nucleic acid sequences, the sequences are aligned for optimal comparison purposes (e.g., gaps can be introduced in the sequence of one polypeptide or nucleic acid molecule for optimal alignment with the other polypeptide or nucleic acid molecule). The amino acid residues or nucleotides at corresponding amino acid positions or nucleotide positions are then compared. When a position in one sequence is occupied by the same amino acid residue or nucleotide as the corresponding position in the other sequence, then the molecules are homologous at that position. As used herein, amino acid or nucleic acid “homology” is equivalent to amino acid or nucleic acid “identity”. The percent homology between the two sequences is a function of the number of identical positions shared by the sequences (i.e., percent homology equals the number of identical positions/total number of positions times 100).

[0066] The invention also encompasses polypeptides having a lower degree of identity but having sufficient similarity so as to perform one or more of the same functions performed by a polypeptide encoded by a nucleic acid molecule of the invention. Similarity is determined by conserved amino acid substitution. Such substitutions are those that substitute a given amino acid in a polypeptide by another amino acid of like characteristics. Conservative substitutions are likely to be phenotypically silent. Typically seen as conservative substitutions are the replacements, one for another, among the aliphatic amino acids Ala, Val, Leu and Ile; interchange of the hydroxyl residues Ser and Thr, exchange of the acidic residues Asp and Glu, substitution between the amide residues Asn and Gln, exchange of the basic residues Lys and Arg and replacements among the aromatic residues Phe and Tyr. Guidance concerning which amino acid changes are likely to be phenotypically silent are found in Bowie et al., Science 247:1306-1310 (1990).

[0067] A variant polypeptide can differ in amino acid sequence by one or more substitutions, deletions, insertions, inversions, fusions, and truncations or a combination of any of these. Further, variant polypeptides can be fully functional or can lack function in one or more activities. Fully functional variants typically contain only conservative variation or variation in non-critical residues or in non-critical regions. Functional variants can also contain substitution of similar amino acids that result in no change or an insignificant change in function. Alternatively, such substitutions may positively or negatively affect function to some degree. Non-functional variants typically contain one or more non-conservative amino acid substitutions, deletions, insertions, inversions, or truncation or a substitution, insertion, inversion, or deletion in a critical residue or critical region.

[0068] Amino acids that are essential for function can be identified by methods known in the art, such as site-directed mutagenesis or alanine-scanning mutagenesis (Cunningham et al., Science, 244:1081-1085 (1989)). The latter procedure introduces single alanine mutations at every residue in the molecule. The resulting mutant molecules are then tested for biological activity in vitro, or in vitro proliferative activity. Sites that are critical for polypeptide activity can also be determined by structural analysis such as crystallization, nuclear magnetic resonance or photoaffinity labeling (Smith et al., J. Mol. Biol., 224:899-904 (1992); de Vos et al. Science, 255:306-312 (1992)).

[0069] The invention also includes polypeptide fragments of the polypeptides of the invention. Fragments can be derived from a polypeptide encoded by a nucleic acid molecule comprising SEQ ID NO: 1 or a portion thereof and the complements thereof (e.g., SEQ ID NO: 2-5 or 10-39, or other splicing variants). However, the invention also encompasses fragments of the variants of the polypeptides described herein. As used herein, a fragment comprises at least 6 contiguous amino acids. Useful fragments include those that retain one or more of the biological activities of the polypeptide as well as fragments that can be used as an immunogen to generate polypeptide-specific antibodies.

[0070] Biologically active fragments (peptides which are, for example, 6, 9, 12, 15, 16, 20, 30, 35, 36, 37, 38, 39, 40, 50, 100 or more amino acids in length) can comprise a domain, segment, or motif that has been identified by analysis of the polypeptide sequence using well-known methods, e.g., signal peptides, extracellular domains, one or more transmembrane segments or loops, ligand binding regions, zinc finger domains, DNA binding domains, acylation sites, glycosylation sites, or phosphorylation sites. Enzymatically active fragments can comprise a domain, segment, or motif that has been identified by analysis of an enzyme using well-known methods, as described above. Such biologically active fragments or enzymatically active fragments can be identified using stadard means for asssaying activity of a polypeptide or enzyme.

[0071] Fragments can be discrete (not fused to other amino acids or polypeptides) or can be within a larger polypeptide. Further, several fragments can be comprised within a single larger polypeptide. In one embodiment a fragment designed for expression in a host can have heterologous pre- and pro-polypeptide regions fused to the amino terminus of the polypeptide fragment and an additional region fused to the carboxyl terminus of the fragment.

[0072] The invention thus provides chimeric or fusion polypeptides. These comprise a polypeptide of the invention operatively linked to a heterologous protein or polypeptide having an amino acid sequence not substantially homologous to the polypeptide. “Operatively linked” indicates that the polypeptide and the heterologous protein are fused in-frame. The heterologous protein can be fused to the N-terminus or C-terminus of the polypeptide. In one embodiment the fusion polypeptide does not affect function of the polypeptide per se. For example, the fusion polypeptide can be a GST-fusion polypeptide in which the polypeptide sequences are fused to the C-terminus of the GST sequences. Other types of fusion polypeptides include, but are not limited to, enzymatic fusion polypeptides, for example β-galactosidase fusions, yeast two-hybrid GAL fusions, poly-His fusions and Ig fusions. Such fusion polypeptides, particularly poly-His fusions, can facilitate the purification of recombinant polypeptide. In certain host cells (e.g., mammalian host cells), expression and/or secretion of a polypeptide can be increased by using a heterologous signal sequence. Therefore, in another embodiment, the fusion polypeptide contains a heterologous signal sequence at its N-terminus.

[0073] EP-A-O 464 533 discloses fusion proteins comprising various portions of immunoglobulin constant regions. The Fc is useful in therapy and diagnosis and thus results, for example, in improved pharmacokinetic properties (EP-A 0232 262). In drug discovery, for example, human proteins have been fused with Fc portions for the purpose of high-throughput screening assays to identify antagonists. Bennett et al., Journal of Molecular Recognition, 8:52-58 (1995) and Johanson et al., The Journal of Biological Chemistry, 270,16:9459-9471 (1995). Thus, this invention also encompasses soluble fusion polypeptides containing a polypeptide of the invention and various portions of the constant regions of heavy or light chains of immunoglobulins of various subclass (IgG, IgM, IgA, IgE).

[0074] A chimeric or fusion polypeptide can be produced by standard recombinant DNA techniques. For example, DNA fragments coding for the different polypeptide sequences are ligated together in-frame in accordance with conventional techniques. In another embodiment, the fusion gene can be synthesized by conventional techniques including automated DNA synthesizers. Alternatively, PCR amplification of nucleic acid fragments can be carried out using anchor primers which give rise to complementary overhangs between two consecutive nucleic acid fragments which can subsequently be annealed and re-amplified to generate a chimeric nucleic acid sequence (see Ausubel et al., Current Protocols in Molecular Biology, 1992). Moreover, many expression vectors are commercially available that already encode a fusion moiety (e.g., a GST protein). A nucleic acid molecule encoding a polypeptide of the invention can be cloned into such an expression vector such that the fusion moiety is linked in-frame to the polypeptide.

[0075] The isolated polypeptide can be purified from cells that naturally express it, purified from cells that have been altered to express it (recombinant), or synthesized using known protein synthesis methods. In one embodiment, the polypeptide is produced by recombinant DNA techniques. For example, a nucleic acid molecule encoding the polypeptide is cloned into an expression vector, the expression vector introduced into a host cell and the polypeptide expressed in the host cell. The polypeptide can then be isolated from the cells by an appropriate purification scheme using standard protein purification techniques.

[0076] In general, polypeptides of the present invention can be used as a molecular weight marker on SDS-PAGE gels or on molecular sieve gel filtration columns using art-recognized methods. The polypeptides of the present invention can be used to raise antibodies or to elicit an immune response. The polypeptides can also be used as a reagent, e.g., a labeled reagent, in assays to quantitatively determine levels of the polypeptide or a molecule to which it binds (e.g., a receptor or a ligand) in biological fluids. The polypeptides can also be used as markers for cells or tissues in which the corresponding polypeptide is preferentially expressed, either constitutively, during tissue differentiation, or in a diseased state. The polypeptides can be used to isolate a corresponding binding agent, e.g., receptor or ligand, such as, for example, in an interaction trap assay, and to screen for peptide or small molecule antagonists or agonists of the binding interaction. For example, because neuregulin 1 binds and activates ErbB receptor tyrosine kinases, the polypeptides can be used to isolate such ErbB receptor kinases.

Antibodies of the Invention

[0077] In another aspect, the invention provides antibodies to the polypeptides and polypeptide fragments of the invention, e.g., having an amino acid sequence encoded by any one of SEQ ID NO:2-5 or 10-39, or a portion thereof, or having an amino acid sequence encoded by a nucleic acid molecule comprising all or a portion of SEQ ID NO: 1 (e.g., SEQ ID NO: 2-5 or 10-39, or another splicing variant, or portion thereof). The term “antibody” as used herein refers to immunoglobulin molecules and immunologically active portions of immunoglobulin molecules, i.e., molecules that contain an antigen binding site that specifically binds an antigen. A molecule that specifically binds to a polypeptide of the invention is a molecule that binds to that polypeptide or a fragment thereof, but does not substantially bind other molecules in a sample, e.g., a biological sample, which naturally contains the polypeptide. Examples of immunologically active portions of immunoglobulin molecules include F(ab) and F(ab′)₂ fragments which can be generated by treating the antibody with an enzyme such as pepsin. The invention provides polyclonal and monoclonal antibodies that bind to a polypeptide of the invention. The term “monoclonal antibody” or “monoclonal antibody composition”, as used herein, refers to a population of antibody molecules that contain only one species of an antigen binding site capable of immunoreacting with a particular epitope of a polypeptide of the invention. A monoclonal antibody composition thus typically displays a single binding affinity for a particular polypeptide of the invention with which it immunoreacts.

[0078] Polyclonal antibodies can be prepared as described above by immunizing a suitable subject with a desired immunogen, e.g., polypeptide of the invention or fragment thereof. The antibody titer in the immunized subject can be monitored over time by standard techniques, such as with an enzyme linked immunosorbent assay (ELISA) using immobilized polypeptide. If desired, the antibody molecules directed against the polypeptide can be isolated from the mammal (e.g., from the blood) and further purified by well-known techniques, such as protein A chromatography to obtain the IgG fraction. At an appropriate time after immunization, e.g., when the antibody titers are highest, antibody-producing cells can be obtained from the subject and used to prepare monoclonal antibodies by standard techniques, such as the hybridoma technique originally described by Kohler and Milstein (1975) Nature, 256:495-497, the human B cell hybridoma technique (Kozbor et al. (1983) Immunol. Today, 4:72), the EBV-hybridoma technique (Cole et al. (1985), Monoclonal Antibodies and Cancer Therapy, Alan R. Liss, Inc., pp. 77-96) or trioma techniques. The technology for producing hybridomas is well known (see generally Current Protocols in Immunology (1994) Coligan et al. (eds.) John Wiley & Sons, Inc., New York, N.Y.). Briefly, an immortal cell line (typically a myeloma) is fused to lymphocytes (typically splenocytes) from a mammal immunized with an immunogen as described above, and the culture supernatants of the resulting hybridoma cells are screened to identify a hybridoma producing a monoclonal antibody that binds a polypeptide of the invention.

[0079] Any of the many well known protocols used for fusing lymphocytes and immortalized cell lines can be applied for the purpose of generating a monoclonal antibody to a polypeptide of the invention (see, e.g., Current Protocols in Immunology, supra; Galfre et al. (1977) Nature, 266:55052; R. H. Kenneth, in Monoclonal Antibodies: A New Dimension In Biological Analyses, Plenum Publishing Corp., New York, N.Y. (1980); and Lerner (1981) Yale J. Biol. Med., 54:387-402. Moreover, the ordinarily skilled worker will appreciate that there are many variations of such methods that also would be useful.

[0080] Alternative to preparing monoclonal antibody-secreting hybridomas, a monoclonal antibody to a polypeptide of the invention can be identified and isolated by screening a recombinant combinatorial immunoglobulin library (e.g., an antibody phage display library) with the polypeptide to thereby isolate immunoglobulin library members that bind the polypeptide. Kits for generating and screening phage display libraries are commercially available (e.g., the Pharmacia Recombinant Phage Antibody System, Catalog No. 27-9400-01; and the Stratagene SurfZAP™ Phage Display Kit, Catalog No. 240612). Additionally, examples of methods and reagents particularly amenable for use in generating and screening antibody display library can be found in, for example, U.S. Pat. No. 5,223,409; PCT Publication No. WO 92/18619; PCT Publication No. WO 91/17271; PCT Publication No. WO 92/20791; PCT Publication No. WO 92/15679; PCT Publication No. WO 93/01288; PCT Publication No. WO 92/01047; PCT Publication No. WO 92/09690; PCT Publication No. WO 90/02809; Fuchs et al. (1991) Bio/Technology, 9:1370-1372; Hay et al. (1992) Hum. Antibod. Hybridomas, 3:81-85; Huse et al. (1989) Science, 246:1275-1281; Griffiths et al. (1993) EMBO J., 12:725-734.

[0081] Additionally, recombinant antibodies, such as chimeric and humanized monoclonal antibodies, comprising both human and non-human portions, which can be made using standard recombinant DNA techniques, are within the scope of the invention. Such chimeric and humanized monoclonal antibodies can be produced by recombinant DNA techniques known in the art. Human antibodies are also contemplated and can be produced and used with techniques known in the art.

[0082] In general, antibodies of the invention (e.g., a monoclonal antibody) can be used to isolate a polypeptide of the invention by standard techniques, such as affinity chromatography or immunoprecipitation. A polypeptide-specific antibody can facilitate the purification of natural polypeptide from cells and of recombinantly produced polypeptide expressed in host cells. Moreover, an antibody specific for a polypeptide of the invention can be used to detect the polypeptide (e.g., in a cellular lysate, cell supernatant, or tissue sample) in order to evaluate the abundance and pattern of expression of the polypeptide. Antibodies can be used diagnostically to monitor protein levels in tissue as part of a clinical testing procedure, e.g., to, for example, determine the efficacy of a given treatment regimen. Detection can be facilitated by coupling the antibody to a detectable substance. Examples of detectable substances include various enzymes, prosthetic groups, fluorescent materials, luminescent materials, bioluminescent materials, and radioactive materials. Examples of suitable enzymes include horseradish peroxidase, alkaline phosphatase, β-galactosidase, or acetylcholinesterase; examples of suitable prosthetic group complexes include streptavidin/biotin and avidin/biotin; examples of suitable fluorescent materials include umbelliferone, fluorescein, fluorescein isothiocyanate, rhodamine, dichlorotriazinylamine fluorescein, dansyl chloride or phycoerythrin; an example of a luminescent material includes luminol; examples of bioluminescent materials include luciferase, luciferin, and aequorin, and examples of suitable radioactive material include 125I, 131I, 35S or 3H.

Diagnostic and Screening Assays of the Invention

[0083] The present invention also pertains to diagnostic assays for assessing neuregulin 1 gene expression, or for assessing activity of NRG1 polypeptides of the invention. In one embodiment, the assays are used in the context of a biological sample (e.g., blood, serum, cells, tissue) to thereby determine whether an individual is afflicted with schizophrenia, or is at risk for (has a predisposition for or a susceptibility to) developing schizophrenia. The invention also provides for prognostic (or predictive) assays for determining whether an individual is susceptible to developing schizophrenia. For example, mutations in the gene can be assayed in a biological sample. Such assays can be used for prognostic or predictive purpose to thereby prophylactically treat an individual prior to the onset of symptoms associated with schizophrenia. Another aspect of the invention pertains to assays for monitoring the influence of agents (e.g., drugs, compounds or other agents) on the gene expression or activity of polypeptides of the invention, as well as to assays for identifying agents which bind to NRG1 polypeptides. These and other assays and agents are described in further detail in the following sections.

Diagnostic Assays

[0084] The nucleic acids, probes, primers, polypeptides and antibodies described herein can be used in methods of diagnosis of a susceptibility to schizophrenia, as well as in kits useful for diagnosis of a susceptibility to schizophrenia.

[0085] In one embodiment of the invention, diagnosis of a susceptibility to schizophrenia is made by detecting a polymorphism in NRG1. The polymorphism can be a mutation in NRG1, such as the insertion or deletion of a single nucleotide, or of more than one nucleotide, resulting in a frame shift mutation; the change of at least one nucleotide, resulting in a change in the encoded amino acid; the change of at least one nucleotide, resulting in the generation of a premature stop codon; the deletion of several nucleotides, resulting in a deletion of one or more amino acids encoded by the nucleotides; the insertion of one or several nucleotides, such as by unequal recombination or gene conversion, resulting in an interruption of the coding sequence of the gene; duplication of all or a part of the gene; transposition of all or a part of the gene; or rearrangement of all or a part of the gene. More than one such mutation may be present in a single gene. Such sequence changes cause a mutation in the polypeptide encoded by NRG1. For example, if the mutation is a frame shift mutation, the frame shift can result in a change in the encoded amino acids, and/or can result in the generation of a premature stop codon, causing generation of a truncated polypeptide. Alternatively, a polymorphism associated with a susceptibility to schizophrenia can be a synonymous mutation in one or more nucleotides (i.e., a mutation that does not result in a change in the polypeptide encoded by NRG1). Such a polymorphism may alter splicing sites, affect the stability or transport of mRNA, or otherwise affect the transcription or translation of the gene. NRG1 that has any of the mutations described above is referred to herein as a “mutant gene.”

[0086] In a first method of diagnosing a susceptibility to schizophrenia, hybridization methods, such as Southern analysis, Northern analysis, or in situ hybridizations, can be used (see Current Protocols in Molecular Biology, Ausubel, F. et al., eds., John Wiley & Sons, including all supplements). For example, a biological sample from a test subject (a “test sample”) of genomic DNA, RNA, or cDNA, is obtained from an individual suspected of having, being susceptible to or predisposed for, or carrying a defect for, schizophrenia (the “test individual”). The individual can be an adult, child, or fetus. The test sample can be from any source which contains genomic DNA, such as a blood sample, sample of amniotic fluid, sample of cerebrospinal fluid, or tissue sample from skin, muscle, buccal or conjunctival mucosa, placenta, gastrointestinal tract or other organs. A test sample of DNA from fetal cells or tissue can be obtained by appropriate methods, such as by amniocentesis or chorionic villus sampling. The DNA, RNA, or cDNA sample is then examined to determine whether a polymorphism in NRG1 is present, and/or to determine which splicing variant(s) encoded by NRG1 is present. The presence of the polymorphism or splicing variant(s) can be indicated by hybridization of the gene in the genomic DNA, RNA, or cDNA to a nucleic acid probe. A “nucleic acid probe”, as used herein, can be a DNA probe or an RNA probe; the nucleic acid probe can contain at least one polymorphism in NRG1 or contains a nucleic acid encoding a particular splicing variant of NRG1. The probe can be any of the nucleic acid molecules described above (e.g., the gene, a fragment, a vector comprising the gene, a probe or primer, etc.)

[0087] To diagnose a susceptibility to schizophrenia, a hybridization sample is formed by contacting the test sample containing NRG1, with at least one nucleic acid probe. A preferred probe for detecting mRNA or genomic DNA is a labeled nucleic acid probe capable of hybridizing to mRNA or genomic DNA sequences described herein. The nucleic acid probe can be, for example, a full-length nucleic acid molecule, or a portion thereof, such as an oligonucleotide of at least 15, 30, 50, 100, 250 or 500 nucleotides in length and sufficient to specifically hybridize under stringent conditions to appropriate mRNA or genomic DNA. For example, the nucleic acid probe can be all or a portion of SEQ ID NO: 1, or the complement of SEQ ID NO: 1, or a portion thereof; or can be a nucleic acid encoding all or a portion of any one (or more) of SEQ ID NO: 2-5 or 10-39. Other suitable probes for use in the diagnostic assays of the invention are described above (see. e.g., probes and primers discussed under the heading, “Nucleic Acids of the Invention”).

[0088] The hybridization sample is maintained under conditions which are sufficient to allow specific hybridization of the nucleic acid probe to NRG1. “Specific hybridization”, as used herein, indicates exact hybridization (e.g., with no mismatches). Specific hybridization can be performed under high stringency conditions or moderate stringency conditions, for example, as described above. In a particularly preferred embodiment, the hybridization conditions for specific hybridization are high stringency.

[0089] Specific hybridization, if present, is then detected using standard methods. If specific hybridization occurs between the nucleic acid probe and NRG1 in the test sample, then NRG1 has the polymorphism, or is the splicing variant, that is present in the nucleic acid probe. More than one nucleic acid probe can also be used concurrently in this method. Specific hybridization of any one of the nucleic acid probes is indicative of a polymorphism in NRG1, or of the presence of a particular splicing variant encoded by NRG1, and is therefore diagnostic for a susceptibility to schizophrenia.

[0090] In Northern analysis (see Current Protocols in Molecular Biology, Ausubel, F. et al., eds., John Wiley & Sons, supra), the hybridization methods described above are used to identify the presence of a polymorphism or of a particular splicing variant, associated with a susceptibility to schizophrenia. For Northern analysis, a test sample of RNA is obtained from the individual by appropriate means. Specific hybridization of a nucleic acid probe, as described above, to RNA from the individual is indicative of a polymorphism in NRG1, or of the presence of a particular splicing variant encoded by NRG1, and is therefore diagnostic for a susceptibility to schizophrenia.

[0091] For representative examples of use of nucleic acid probes, see, for example, U.S. Pat. Nos. 5,288,611 and 4,851,330.

[0092] Alternatively, a peptide nucleic acid (PNA) probe can be used instead of a nucleic acid probe in the hybridization methods described above. PNA is a DNA mimic having a peptide-like, inorganic backbone, such as N-(2-aminoethyl)glycine units, with an organic base (A, G, C, T or U) attached to the glycine nitrogen via a methylene carbonyl linker (see, for example, Nielsen, P. E. et al., Bioconjugate Chemistry, 1994, 5, American Chemical Society, p. 1 (1994). The PNA probe can be designed to specifically hybridize to a gene having a polymorphism associated with a susceptibility to schizophrenia. Hybridization of the PNA probe to NRG1 is diagnostic for a susceptibility to schizophrenia.

[0093] In another method of the invention, mutation analysis by restriction digestion can be used to detect a mutant gene, or genes containing a polymorphism(s), if the mutation or polymorphism in the gene results in the creation or elimination of a restriction site. A test sample containing genomic DNA is obtained from the individual. Polymerase chain reaction (PCR) can be used to amplify NRG1 (and, if necessary, the flanking sequences) in the test sample of genomic DNA from the test individual. RFLP analysis is conducted as described (see Current Protocols in Molecular Biology, supra). The digestion pattern of the relevant DNA fragment indicates the presence or absence of the mutation or polymorphism in NRG1, and therefore indicates the presence or absence of this susceptibility to schizophrenia.

[0094] Sequence analysis can also be used to detect specific polymorphisms in NRG1. A test sample of DNA or RNA is obtained from the test individual. PCR or other appropriate methods can be used to amplify the gene, and/or its flanking sequences, if desired. The sequence of NRG1, or a fragment of the gene, or cDNA, or fragment of the cDNA, or mRNA, or fragment of the mRNA, is determined, using standard methods. The sequence of the gene, gene fragment, cDNA, cDNA fragment, mRNA, or mRNA fragment is compared with the known nucleic acid sequence of the gene, cDNA (e.g., SEQ ID NO: 1, or a nucleic acid sequence encoding any one (or more) of SEQ ID NO: 2-5 or 10-39, or a fragment thereof) or mRNA, as appropriate. The presence of a polymorphism in NRG1 indicates that the individual has a susceptibility to schizophrenia.

[0095] Allele-specific oligonucleotides can also be used to detect the presence of a polymorphism in NRG1, through the use of dot-blot hybridization of amplified oligonucleotides with allele-specific oligonucleotide (ASO) probes (see, for example, Saiki, R. et al., (1986), Nature (London) 324:163-166). An “allele-specific oligonucleotide” (also referred to herein as an “allele-specific oligonucleotide probe”) is an oligonucleotide of approximately 10-50 base pairs, preferably approximately 15-30 base pairs, that specifically hybridizes to NRG1, and that contains a polymorphism associated with a susceptibility to schizophrenia. An allele-specific oligonucleotide probe that is specific for particular polymorphisms in NRG1 can be prepared, using standard methods (see Current Protocols in Molecular Biology, supra). To identify polymorphisms in the gene that are associated with a susceptibility to schizophrenia, a test sample of DNA is obtained from the individual. PCR can be used to amplify all or a fragment of NRG1, and its flanking sequences. The DNA containing the amplified NRG1 (or fragment of the gene) is dot-blotted, using standard methods (see Current Protocols in Molecular Biology, supra), and the blot is contacted with the oligonucleotide probe. The presence of specific hybridization of the probe to the amplified NRG1 is then detected. Specific hybridization of an allele-specific oligonucleotide probe to DNA from the individual is indicative of a polymorphism in NRG1, and is therefore indicative of a susceptibility to schizophrenia.

[0096] In another embodiment, arrays of oligonucleotide probes that are complementary to target nucleic acid sequence segments from an individual, can be used to identify polymorphisms in NRG1. For example, in one embodiment, an oligonucleotide array can be used. Oligonucleotide arrays typically comprise a plurality of different oligonucleotide probes that are coupled to a surface of a substrate in different known locations. These oligonucleotide arrays, also described as “Genechips™,” have been generally described in the art, for example, U.S. Pat. No. 5,143,854 and PCT patent publication Nos. WO 90/15070 and 92/10092. These arrays can generally be produced using mechanical synthesis methods or light directed synthesis methods which incorporate a combination of photolithographic methods and solid phase oligonucleotide synthesis methods. See Fodor et al., Science, 251:767-777 (1991), Pirrung et al., U.S. Pat. No. 5,143,854 (see also PCT Application No. WO 90/15070) and Fodor et al., PCT Publication No. WO 92/10092 and U.S. Pat. No. 5,424,186, the entire teachings of each of which are incorporated by reference herein. Techniques for the synthesis of these arrays using mechanical synthesis methods are described in, e.g., U.S. Pat. No. 5,384,261, the entire teachings of which are incorporated by reference herein.

[0097] Once an oligonucleotide array is prepared, a nucleic acid of interest is hybridized with the array and scanned for polymorphisms. Hybridization and scanning are generally carried out by methods described herein and also in, e.g., Published PCT Application Nos. WO 92/10092 and WO 95/11995, and U.S. Pat. No. 5,424,186, the entire teachings of which are incorporated by reference herein. In brief, a target nucleic acid sequence which includes one or more previously identified polymorphic markers is amplified by well known amplification techniques, e.g., PCR. Typically, this involves the use of primer sequences that are complementary to the two strands of the target sequence both upstream and downstream from the polymorphism. Asymmetric PCR techniques may also be used. Amplified target, generally incorporating a label, is then hybridized with the array under appropriate conditions. Upon completion of hybridization and washing of the array, the array is scanned to determine the position on the array to which the target sequence hybridizes. The hybridization data obtained from the scan is typically in the form of fluorescence intensities as a function of location on the array.

[0098] Although primarily described in terms of a single detection block, e.g., for detection of a single polymorphism, arrays can include multiple detection blocks, and thus be capable of analyzing multiple, specific polymorphisms. In alternate arrangements, it will generally be understood that detection blocks may be grouped within a single array or in multiple, separate arrays so that varying, optimal conditions may be used during the hybridization of the target to the array. For example, it may often be desirable to provide for the detection of those polymorphisms that fall within G-C rich stretches of a genomic sequence, separately from those falling in A-T rich segments. This allows for the separate optimization of hybridization conditions for each situation.

[0099] Additional description of use of oligonucleotide arrays for detection of polymorphisms can be found, for example, in U.S. Pat. Nos. 5,858,659 and 5,837,832, the entire teachings of which are incorporated by reference herein.

[0100] Other methods of nucleic acid analysis can be used to detect polymorphisms in NRG1 or splicing variants encoded by NRG1. Representative methods include direct manual sequencing (Church and Gilbert, (1988), Proc. Natl. Acad. Sci. USA 81:1991-1995; Sanger, F. et al. (1977) Proc. Natl. Acad. Sci. 74:5463-5467; Beavis et al. U.S. Pat. No. 5,288,644); automated fluorescent sequencing; single-stranded conformation polymorphism assays (SSCP); clamped denaturing gel electrophoresis (CDGE); denaturing gradient gel electrophoresis (DGGE) (Sheffield, V. C. et al. (19891) Proc. Natl. Acad. Sci. USA 86:232-236), mobility shift analysis (Orita, M. et al. (1989) Proc. Natl. Acad. Sci. USA 86:2766-2770), restriction enzyme analysis (Flavell et al. (1978) Cell 15:25; Geever, et al. (1981) Proc. Natl. Acad. Sci. USA 78:5081); heteroduplex analysis; chemical mismatch cleavage (CMC) (Cotton et al. (1985) Proc. Natl. Acad. Sci. USA 85:4397-4401); RNase protection assays (Myers, R. M. et al. (1985) Science 230:1242); use of polypeptides which recognize nucleotide mismatches, such as E. coli mutS protein; allele-specific PCR, for example.

[0101] In another embodiment of the invention, diagnosis of a susceptibility to schizophrenia can also be made by examining expression and/or composition of an NRG1 polypeptide, by a variety of methods, including enzyme linked immunosorbent assays (ELISAs), Western blots, immunoprecipitations and immunofluorescence. A test sample from an individual is assessed for the presence of an alteration in the expression and/or an alteration in composition of the polypeptide encoded by NRG1, or for the presence of a particular splicing variant encoded by NRG1. An alteration in expression of a polypeptide encoded by NRG1 can be, for example, an alteration in the quantitative polypeptide expression (i.e., the amount of polypeptide produced); an alteration in the composition of a polypeptide encoded by NRG1 is an alteration in the qualitative polypeptide expression (e.g., expression of a mutant NRG1 polypeptide or of a different splicing variant). In a preferred embodiment, diagnosis of a susceptibility to schizophrenia is made by detecting a particular splicing variant encoded by NRG1, or a particular pattern of splicing variants.

[0102] Both quantitative and qualitative alterations can also be present. An “alteration” in the polypeptide expression or composition, as used herein, refers to an alteration in expression or composition in a test sample, as compared with the expression or composition of polypeptide by NRG1 in a control sample. A control sample is a sample that corresponds to the test sample (e.g., is from the same type of cells), and is from an individual who is not affected by schizophrenia. An alteration in the expression or composition of the polypeptide in the test sample, as compared with the control sample, is indicative of a susceptibility to schizophrenia. Similarly, the presence of one or more different splicing variants in the test sample, or the presence of significantly different amounts of different splicing variants in the test sample, as compared with the control sample, is indicative of a susceptibility to schizophrenia. Various means of examining expression or composition of the polypeptide encoded by NRG1 can be used, including spectroscopy, colorimetry, electrophoresis, isoelectric focusing, and immunoassays (e.g., David et al., U.S. Pat. No. 4,376,110) such as immunoblotting (see also Current Protocols in Molecular Biology, particularly chapter 10). For example, in one embodiment, an antibody capable of binding to the polypeptide (e.g., as described above), preferably an antibody with a detectable label, can be used. Antibodies can be polyclonal, or more preferably, monoclonal. An intact antibody, or a fragment thereof (e.g., Fab or F(ab′)₂) can be used. The term “labeled”, with regard to the probe or antibody, is intended to encompass direct labeling of the probe or antibody by coupling (i.e., physically linking) a detectable substance to the probe or antibody, as well as indirect labeling of the probe or antibody by reactivity with another reagent that is directly labeled. Examples of indirect labeling include detection of a primary antibody using a fluorescently labeled secondary antibody and end-labeling of a DNA probe with biotin such that it can be detected with fluorescently labeled streptavidin.

[0103] Western blotting analysis, using an antibody as described above that specifically binds to a polypeptide encoded by a mutant NRG1, or an antibody that specifically binds to a polypeptide encoded by a non-mutant gene, or an antibody that specifically binds to a particular splicing variant encoded by NRG1, can be used to identify the presence in a test sample of a particular splicing variant or of a polypeptide encoded by a polymorphic or mutant NRG1, or the absence in a test sample of a particular splicing variant or of a polypeptide encoded by a non-polymorphic or non-mutant gene. The presence of a polypeptide encoded by a polymorphic or mutant gene, or the absence of a polypeptide encoded by a non-polymorphic or non-mutant gene, is diagnostic for a susceptibility to schizophrenia, as is the presence (or absence) of particular splicing variants encoded by the neuregulin 1 gene.

[0104] In one embodiment of this method, the level or amount of polypeptide encoded by NRG1 in a test sample is compared with the level or amount of the polypeptide encoded by NRG1 in a control sample. A level or amount of the polypeptide in the test sample that is higher or lower than the level or amount of the polypeptide in the control sample, such that the difference is statistically significant, is indicative of an alteration in the expression of the polypeptide encoded by NRG1, and is diagnostic for a susceptibility to schizophrenia. Alternatively, the composition of the polypeptide encoded by NRG1 in a test sample is compared with the composition of the polypeptide encoded by NRG1 in a control sample. A difference in the composition of the polypeptide in the test sample, as compared with the composition of the polypeptide in the control sample (e.g., the presence of different splicing variants), is diagnostic for a susceptibility to schizophrenia. In another embodiment, both the level or amount and the composition of the polypeptide can be assessed in the test sample and in the control sample. A difference in the amount or level of the polypeptide in the test sample, compared to the control sample; a difference in composition in the test sample, compared to the control sample; or both a difference in the amount or level, and a difference in the composition, is indicative of a susceptibility to schizophrenia.

[0105] The invention also pertains to methods of diagnosing a susceptibility to schizophrenia in an individual, comprising screening for an at-risk haplotype in neuregulin 1 gene that is more frequently present in an individual susceptible to schizophrenia (affected), compared to the frequency of its presence in a healthy individual (control), wherein the presence of the haplotype is indicative of a susceptibility to schizophrenia. See FIG. 5 and FIG. 6 for SNPs and markers that comprise haplotypes that can be used as screening tools. See also Tables 2 and 3 which set forth SNPs and markers and their counterpart sequence ID reference numbers. SNPs and markers from these lists represent the at-risk haplotype and can be used to design diagnostic tests for determining susceptiblity to schizophrenia. In one embodiment, the at-risk haplotype is characterized by the presence of: SNP8NRG221132 (SEQ ID NO: 1372), SNP8NRG221533 (SEQ ID NO: 1373), SNP8NRG241930 (SEQ ID NO: 1669), SNP8NRG243177 (SEQ ID NO: 1670), SNP8NRG433E1006 (single nucleotide polymorphism “r” at position 433 of SEQ ID NO: 104 in exon E1006A), microsatellite marker 478B14-848 (SEQ ID NOs: 55 and 56), and microsatellite marker 420M9-1395 (SEQ ID NOs: 57 and 58). In another embodiment, the at-risk halpotype is further characterized by the presence of one or a combination of: SNP8NRG85307DEL25 (SEQ ID NO: 1375), SNP8NRG103492 (SEQ ID NO: 1533), SNP8NRG157556 (SEQ ID NO: 1668), microsatellite marker D8S1810 (Accession number: GDB: 613185), SNP8NRG444511 (SEQ ID NO: 1671), SNP8NRG449280 (SEQ ID NO: 1672), microsatellite marker TSC0707270 (SEQ ID NO: 1673) and microsatellite marker TSC0707290 (SEQ ID NO: 1674). In yet another embodiment, the at-risk haplotype is selected from the group consisting of: HapA, HapB, HapC1 and HapC. In a preferred embodiment, the at-risk haplotype is characterized by the presence of: SNP8NRG221533, microsatellite marker 478B14-848, and microsatellite marker 420M9-1395. In the most preferred embodiment, the at-risk haplotype is characterized by the presence of SNP8NRG221533.

[0106] Kits (e.g., reagent kits) useful in the methods of diagnosis comprise components useful in any of the methods described herein, including for example, hybridization probes or primers as described herein (e.g., labeled probes or primers), reagents for detection of labeled molecules, restriction enzymes (e.g., for RFLP analysis), allele-specific oligonucleotides, antibodies which bind to mutant or to non-mutant (native) NRG1 polypeptide (e.g., to any one (or more) of SEQ ID NO:2-5 or 10-39), means for amplification of nucleic acids comprising NRG1, or means for analyzing the nucleic acid sequence of NRG1 or for analyzing the amino acid sequence of an NRG1 polypeptide, etc.

[0107] Screening Assays and Agents Identified Thereby

[0108] The invention provides methods (also referred to herein as “screening assays”) for identifying the presence of a nucleotide that hybridizes to a nucleic acid of the invention, as well as for identifying the presence of a polypeptide encoded by a nucleic acid of the invention. In one embodiment, the presence (or absence) of a nucleic acid molecule of interest (e.g., a nucleic acid that has significant homology with a nucleic acid of the invention) in a sample can be assessed by contacting the sample with a nucleic acid comprising a nucleic acid of the invention (e.g., a nucleic acid having the sequence of SEQ ID NO: 1 or the complement of SEQ ID NO: 1, or a nucleic acid encoding an amino acid having the sequence of any one of SEQ ID NO: 2-5 or 10-39, or a fragment or variant of such nucleic acids), under high stringency conditions as described above, and then assessing the sample for the presence (or absence) of hybridization. In a preferred embodiment, the high stringency conditions are conditions appropriate for selective hybridization. In a preferred embodiment, the high stringency conditions are conditions appropriate for selective hybridization. In another embodiment, a sample containing the nucleic acid molecule of interest is contacted with a nucleic acid containing a contiguous nucleotide sequence (e.g., a primer or a probe as described above) that is at least partially complementary to a part of the nucleic acid molecule of interest (e.g., a neuregulin 1 nucleic acid), and the contacted sample is assessed for the presence or absence of hybridization. In a preferred embodiment, the nucleic acid containing a contiguous nucleotide sequence is completely complementary to a part of the nucleic acid molecule of interest.

[0109] In any of these embodiment, all or a portion of the nucleic acid of interest can be subjected to amplification prior to performing the hybridization.

[0110] In another embodiment, the presence (or absence) of a polypeptide of interest, such as a polypeptide of the invention or a fragment or variant thereof, in a sample can be assessed by contacting the sample with an antibody that specifically hybridizes to the polypeptide of interest (e.g., an antibody such as those described above), and then assessing the sample for the presence (or absence) of binding of the antibody to the polypeptide of interest.

[0111] In another embodiment, the invention provides methods for identifying agents (e.g., fusion proteins, polypeptides, peptidomimetics, prodrugs, receptors, binding agents, antibodies, small molecules or other drugs, or ribozymes) which alter (e.g., increase or decrease) the activity of the polypeptides described herein, or which otherwise interact with the polypeptides herein. For example, such agents can be agents which bind to polypeptides described herein (e.g., NRG1 binding agents); which have a stimulatory or inhibitory effect on, for example, activity of polypeptides of the invention; which change (e.g., enhance or inhibit) the ability of the polypeptides of the invention to interact with NRG1 binding agents (e.g., receptors or other binding agents); or which alter posttranslational processing of the NRG1 polypeptide (e.g., agents that alter proteolytic processing to direct the polypeptide from where it is normally synthesized to another location in the cell, such as the cell surface; agents that alter proteolytic processing such that more active polypeptide is released from the cell, etc.).

[0112] In one embodiment, the invention provides assays for screening candidate or test agents that bind to or modulate the activity of polypeptides described herein (or biologically or enzymatically active portion(s) thereof), as well as agents identifiable by the assays. Test agents can be obtained using any of the numerous approaches in combinatorial library methods known in the art, including: biological libraries; spatially addressable parallel solid phase or solution phase libraries; synthetic library methods requiring deconvolution; the ‘one-bead one-compound’ library method; and synthetic library methods using affinity chromatography selection. The biological library approach is limited to polypeptide libraries, while the other four approaches are applicable to polypeptide, non-peptide oligomer or small molecule libraries of compounds (Lam, K. S. (1997) Anticancer Drug Des., 12:145).

[0113] In one embodiment, to identify agents which alter the activity of an NRG1 polypeptide, a cell, cell lysate, or solution containing or expressing an NRG1 polypeptide (e.g., SEQ ID NO: 2-5 or 10-39, or another splicing variant encoded by NRG1), or a fragment or derivative thereof (as described above), can be contacted with an agent to be tested; alternatively, the polypeptide can be contacted directly with the agent to be tested. The level (amount) of NRG1 activity is assessed (e.g., the level (amount) of NRG1 activity is measured, either directly or indirectly), and is compared with the level of activity in a control (i.e., the level of activity of the NRG1 polypeptide or fragment or derivative thereof in the absence of the agent to be tested). If the level of the activity in the presence of the agent differs, by an amount that is statistically significant, from the level of the activity in the absence of the agent, then the agent is an agent that alters the activity of NRG1 polypeptide. An increase in the level of NRG1 polypeptide activity relative to a control, indicates that the agent is an agent that enhances (is an agonist of) NRG1 activity. Similarly, a decrease in the level of NRG1 polypeptide activity relative to a control, indicates that the agent is an agent that inhibits (is an antagonist of) NRG1 activity. In another embodiment, the level of activity of an NRG1 polypeptide or derivative or fragment thereof in the presence of the agent to be tested, is compared with a control level that has previously been established. A level of the activity in the presence of the agent that differs from the control level by an amount that is statistically significant indicates that the agent alters NRG1 activity.

[0114] The present invention also relates to an assay for identifying agents which alter the expression of NRG1 (e.g., antisense nucleic acids, fusion proteins, polypeptides, peptidomimetics, prodrugs, receptors, binding agents, antibodies, small molecules or other drugs, or ribozymes) which alter (e.g., increase or decrease) expression (e.g., transcription or translation) of the gene or which otherwise interact with the nucleic acids described herein, as well as agents identifiable by the assays. For example, a solution containing a nucleic acid encoding NRG1 polypeptide (e.g., NRG1) can be contacted with an agent to be tested. The solution can comprise, for example, cells containing the nucleic acid or cell lysate containing the nucleic acid; alternatively, the solution can be another solution which comprises elements necessary for transcription/translation of the nucleic acid. Cells not suspended in solution can also be employed, if desired. The level and/or pattern of NRG1 expression (e.g., the level and/or pattern of mRNA or of protein expressed, such as the level and/or pattern of different splicing variants) is assessed, and is compared with the level and/or pattern of expression in a control (i.e., the level and/or pattern of the NRG1 expression in the absence of the agent to be tested). If the level and/or pattern in the presence of the agent differs, by an amount or in a manner that is statistically significant, from the level and/or pattern in the absence of the agent, then the agent is an agent that alters the expression of NRG1. Enhancement of NRG1 expression indicates that the agent is an agonist of NRG1 activity. Similarly, inhibition of NRG1 expression indicates that the agent is an antagonist of NRG1 activity. In another embodiment, the level and/or pattern of NRG1 polypeptide(s) (e.g., different splicing variants) in the presence of the agent to be tested, is compared with a control level and/or pattern that has previously been established. A level and/or pattern in the presence of the agent that differs from the control level and/or pattern by an amount or in a manner that is statistically significant indicates that the agent alters NRG1 expression.

[0115] In another embodiment of the invention, agents which alter the expression of the neuregulin 1 gene or which otherwise interact with the nucleic acids described herein, can be identified using a cell, cell lysate, or solution containing a nucleic acid encoding the promoter region of the neuregulin 1 gene operably linked to a reporter gene. After contact with an agent to be tested, the level of expression of the reporter gene (e.g., the level of mRNA or of protein expressed) is assessed, and is compared with the level of expression in a control (i.e., the level of the expression of the reporter gene in the absence of the agent to be tested). If the level in the presence of the agent differs, by an amount or in a manner that is statistically significant, from the level in the absence of the agent, then the agent is an agent that alters the expression of NRG1, as indicated by its ability to alter expression of a gene that is operably linked to the NRG1 promoter. Enhancement of the expression of the reporter indicates that the agent is an agonist of NRG1 activity. Similarly, inhibition of the expression of the reporter indicates that the agent is an antagonist of NRG1 activity. In another embodiment, the level of expression of the reporter in the presence of the agent to be tested, is compared with a control level that has previously been established. A level in the presence of the agent that differs from the control level by an amount or in a manner that is statistically significant indicates that the agent alters NRG1 expression.

[0116] Agents which alter the amounts of different splicing variants encoded by NRG1 (e.g., an agent which enhances activity of a first splicing variant, and which inhibits activity of a second splicing variant), as well as agents which are agonists of activity of a first splicing variant and antagonists of activity of a second splicing variant, can easily be identified using these methods described above.

[0117] In other embodiments of the invention, assays can be used to assess the impact of a test agent on the activity of an NRG1 polypeptide in relation to an NRG1 binding agent. For example, a cell that expresses a compound that interacts with NRG1 polypeptide (herein referred to as a “NRG1 binding agent”, which can be a polypeptide or other molecule that interacts with NRG1 polypeptide, such as a receptor) is contacted with NRG1 polypeptide in the presence of a test agent, and the ability of the test agent to alter the interaction between NRG1 polypeptide and the NRG1 binding agent is determined. Alternatively, a cell lysate or a solution containing the NRG1 binding agent, can be used. An agent which binds to NRG1 polypeptide or the NRG1 binding agent can alter the interaction by interfering with, or enhancing the ability of NRG1 polypeptide to bind to, associate with, or otherwise interact with the NRG1 binding agent. Determining the ability of the test agent to bind to NRG1 polypeptide or an NRG1 binding agent can be accomplished, for example, by coupling the test agent with a radioisotope or enzymatic label such that binding of the test agent to the polypeptide can be determined by detecting the labeled with ¹²⁵I, ³⁵S, ¹⁴C or ³H, either directly or indirectly, and the radioisotope detected by direct counting of radioemmission or by scintillation counting. Alternatively, test agents can be enzymatically labeled with, for example, horseradish peroxidase, alkaline phosphatase, or luciferase, and the enzymatic label detected by determination of conversion of an appropriate substrate to product. It is also within the scope of this invention to determine the ability of a test agent to interact with the polypeptide without the labeling of any of the interactants. For example, a microphysiometer can be used to detect the interaction of a test agent with NRG1 polypeptide or an NRG1 binding agent without the labeling of either the test agent, NRG1 polypeptide, or the NRG1 binding agent. McConnell, H. M. et al. (1992) Science, 257:1906-1912. As used herein, a “microphysiometer” (e.g., Cytosensor™) is an analytical instrument that measures the rate at which a cell acidifies its environment using a light-addressable potentiometric sensor (LAPS). Changes in this acidification rate can be used as an indicator of the interaction between ligand and polypeptide.

[0118] In another embodiment of the invention, assays can be used to identify polypeptides that interact with one or more NRG1 polypeptides, as described herein. For example, a yeast two-hybrid system such as that described by Fields and Song (Fields, S. and Song, O., Nature 340:245-246 (1989)) can be used to identify polypeptides that interact with one or more NRG1 polypeptides. In such a yeast two-hybrid system, vectors are constructed based on the flexibility of a transcription factor which has two functional domains (a DNA binding domain and a transcription activation domain). If the two domains are separated but fused to two different proteins that interact with one another, transcriptional activation can be achieved, and transcription of specific markers (e.g., nutritional markers such as His and Ade, or color markers such as lacZ) can be used to identify the presence of interaction and transcriptional activation. For example, in the methods of the invention, a first vector is used which includes a nucleic acid encoding a DNA binding domain and also an NRG1 polypeptide, splicing variant, or fragment or derivative thereof, and a second vector is used which includes a nucleic acid encoding a transcription activation domain and also a nucleic acid encoding a polypeptide which potentially may interact with the NRG1 polypeptide, splicing variant, or fragment or derivative thereof (e.g., a NRG1 polypeptide binding agent or receptor). Incubation of yeast containing the first vector and the second vector under appropriate conditions (e.g., mating conditions such as used in the Matchmaker™ system from Clontech) allows identification of colonies which express the markers of interest. These colonies can be examined to identify the polypeptide(s) which interact with the NRG1 polypeptide or fragment or derivative thereof. Such polypeptides may be useful as agents which alter the activity of expression of an NRG1 polypeptide, as described above.

[0119] In more than one embodiment of the above assay methods of the present invention, it may be desirable to immobilize either NRG1 polypeptide, the NRG1 binding agent, or other components of the assay on a solid support, in order to facilitate separation of complexed from uncomplexed forms of one or both of the polypeptides, as well as to accommodate automation of the assay. Binding of a test agent to the polypeptide, or interaction of the polypeptide with a binding agent in the presence and absence of a test agent, can be accomplished in any vessel suitable for containing the reactants. Examples of such vessels include microtitre plates, test tubes, and micro-centrifuge tubes. In one embodiment, a fusion protein (e.g., a glutathione-S-transferase fusion protein) can be provided which adds a domain that allows NRG1 polypeptide or an NRG1 binding agent to be bound to a matrix or other solid support.

[0120] In another embodiment, modulators of expression of nucleic acid molecules of the invention are identified in a method wherein a cell, cell lysate, or solution containing a nucleic acid encoding NRG1 polypeptide is contacted with a test agent and the expression of appropriate mRNA or polypeptide (e.g., splicing variant(s)) in the cell, cell lysate, or solution, is determined. The level of expression of appropriate mRNA or polypeptide(s) in the presence of the test agent is compared to the level of expression of mRNA or polypeptide(s) in the absence of the test agent. The test agent can then be identified as a modulator of expression based on this comparison. For example, when expression of mRNA or polypeptide is greater (statistically significantly greater) in the presence of the test agent than in its absence, the test agent is identified as a stimulator or enhancer of the mRNA or polypeptide expression. Alternatively, when expression of the mRNA or polypeptide is less (statistically significantly less) in the presence of the test agent than in its absence, the test agent is identified as an inhibitor of the mRNA or polypeptide expression. The level of mRNA or polypeptide expression in the cells can be determined by methods described herein for detecting mRNA or polypeptide.

[0121] In yet another embodiment, the invention provides methods for identifying agents (e.g., fusion proteins, polypeptides, peptidomimetics, prodrugs, receptors, binding agents, antibodies, small molecules or other drugs, or ribozymes) which alter (e.g., increase or decrease) the activity of an NRG1 binding agent, as described herein. For example, such agents can be agents which have a stimulatory or inhibitory effect on, for example, the activity of an NRG1 binding agent; which change (e.g., enhance or inhibit) the ability NRG1 binding agents (e.g., receptors or other binding agents) to interact with the polypeptides of the invention; or which alter posttranslational processing of the NRG1 binding agent (e.g., agents that alter proteolytic processing to direct the NRG1 binding agent from where it is normally synthesized to another location in the cell, such as the cell surface; agents that alter proteolytic processing such that more active NRG1 binding agent is released from the cell, etc.).

[0122] For example, the invention provides assays for screening candidate or test agents that bind to or modulate the activity of an NRG1 binding agent described herein (or enzymatically active portion(s) thereof), as well as agents identifiable by the assays. As described above, test agents can be obtained using any of the numerous approaches in combinatorial library methods known in the art, including: biological libraries; spatially addressable parallel solid phase or solution phase libraries; synthetic library methods requiring deconvolution; the ‘one-bead one-compound’ library method; and synthetic library methods using affinity chromatography selection. The biological library approach is limited to polypeptide libraries, while the other four approaches are applicable to polypeptide, non-peptide oligomer or small molecule libraries of compounds (Lam, K. S. (1997) Anticancer Drug Des., 12:145).

[0123] In one embodiment, to identify agents which alter the activity of an NRG1 binding agent, a cell, cell lysate, or solution containing or expressing an NRG1 binding agent (e.g., an ErbB protein, such as ErbB2, ErbB3, and/or ErbB4 protein), or a fragment (e.g., an enzymatically active fragment) or derivative thereof (as described above), for example, fragments of the ErbB4 receptor such as fragments (1) (aa 713-988), fragment (2) (aa 767-1308), fragment (3) (aa 676-1030), fragment 4 (aa 676-1119), fragment 5 (aa 676-1213), and/or fragment (6) (aa 676-1308), as described below, or a derivative thereof, can be contacted with an agent to be tested; alternatively, the NRG1 binding agent (or fragment or derivative thereof) can be contacted directly with the agent to be tested. The level (amount) of NRG1 binding agent activity is assessed (e.g., the level (amount) of NRG1 binding agent activity is measured, either directly or indirectly), and is compared with the level of activity in a control (i.e., the level of activity of the NRG1 binding agent or fragment or derivative thereof in the absence of the agent to be tested). If the level of the activity in the presence of the agent differs, by an amount that is statistically significant, from the level of the activity in the absence of the agent, then the agent is an agent that alters the activity of NRG1 binding agent. An increase in the level of NRG1 binding agent activity relative to a control, indicates that the agent is an agent that enhances (is an agonist of) NRG1 binding agent activity. Similarly, a decrease in the level of NRG1 binding agent activity relative to a control, indicates that the agent is an agent that inhibits (is an antagonist of) NRG1 binding agent activity. In another embodiment, the level of activity of an NRG1 binding agent or derivative or fragment thereof in the presence of the agent to be tested, is compared with a control level that has previously been established. A level of the activity in the presence of the agent that differs from the control level by an amount that is statistically significant indicates that the agent alters NRG1 binding agent activity.

[0124] This invention further pertains to novel agents identified by the above-described screening assays. Accordingly, it is within the scope of this invention to further use an agent identified as described herein in an appropriate animal model. For example, an agent identified as described herein (e.g., a test agent that is a modulating agent, an antisense nucleic acid molecule, a specific antibody, or a polypeptide-binding agent) can be used in an animal model to determine the efficacy, toxicity, or side effects of treatment with such an agent. Alternatively, an agent identified as described herein can be used in an animal model to determine the mechanism of action of such an agent. Furthermore, this invention pertains to uses of novel agents identified by the above-described screening assays for treatments as described herein. In addition, an agent identified as described herein can be used to alter activity of a polypeptide encoded by neuregulin 1, or to alter expression of neuregulin 1, by contacting the polypeptide or the gene (or contacting a cell comprising the polypeptide or the gene) with the agent identified as described herein.

[0125] Pharmaceutical Compositions

[0126] The present invention also pertains to pharmaceutical compositions comprising nucleic acids described herein, particularly nucleotides encoding the polypeptides described herein; comprising polypeptides described herein (e.g., one or more of SEQ ID NO: 2-5 or 10-39, and/or other splicing variants encoded by NRG1); comprising an NRG1 therapeutic agent, as described below; and/or comprising an agent that alters (e.g., enhances or inhibits) NRG1 expression or NRG1 polypeptide activity as described herein. For instance, a polypeptide, protein (e.g., an NRG1 receptor), fragment, fusion protein or prodrug thereof, or a nucleotide or nucleic acid construct (vector) comprising a nucleotide of the present invention, an agent that alters NRG1 polypeptide activity, an agent that alters neuregulin 1 gene expression, or an NRG1 binding agent or binding partner (e.g., a receptor or other molecule that binds to or otherwise interacts with NRG1 polypeptide), can be formulated with a physiologically acceptable carrier or excipient to prepare a pharmaceutical composition. The carrier and composition can be sterile. The formulation should suit the mode of administration.

[0127] Suitable pharmaceutically acceptable carriers include but are not limited to water, salt solutions (e.g., NaCl), saline, buffered saline, alcohols, glycerol, ethanol, gum arabic, vegetable oils, benzyl alcohols, polyethylene glycols, gelatin, carbohydrates such as lactose, amylose or starch, dextrose, magnesium stearate, talc, silicic acid, viscous paraffin, perfume oil, fatty acid esters, hydroxymethylcellulose, polyvinyl pyrolidone, etc., as well as combinations thereof. The pharmaceutical preparations can, if desired, be mixed with auxiliary agents, e.g., lubricants, preservatives, stabilizers, wetting agents, emulsifiers, salts for influencing osmotic pressure, buffers, coloring, flavoring and/or aromatic substances and the like which do not deleteriously react with the active agents.

[0128] The composition, if desired, can also contain minor amounts of wetting or emulsifying agents, or pH buffering agents. The composition can be a liquid solution, suspension, emulsion, tablet, pill, capsule, sustained release formulation, or powder. The composition can be formulated as a suppository, with traditional binders and carriers such as triglycerides. Oral formulation can include standard carriers such as pharmaceutical grades of mannitol, lactose, starch, magnesium stearate, polyvinyl pyrollidone, sodium saccharine, cellulose, magnesium carbonate, etc.

[0129] Methods of introduction of these compositions include, but are not limited to, intradermal, intramuscular, intraperitoneal, intraocular, intravenous, subcutaneous, topical, oral and intranasal. Other suitable methods of introduction can also include gene therapy (as described below), rechargeable or biodegradable devices, particle acceleration devises (“gene guns”) and slow release polymeric devices. The pharmaceutical compositions of this invention can also be administered as part of a combinatorial therapy with other agents.

[0130] The composition can be formulated in accordance with the routine procedures as a pharmaceutical composition adapted for administration to human beings. For example, compositions for intravenous administration typically are solutions in sterile isotonic aqueous buffer. Where necessary, the composition may also include a solubilizing agent and a local anesthetic to ease pain at the site of the injection. Generally, the ingredients are supplied either separately or mixed together in unit dosage form, for example, as a dry lyophilized powder or water free concentrate in a hermetically sealed container such as an ampule or sachette indicating the quantity of active agent. Where the composition is to be administered by infusion, it can be dispensed with an infusion bottle containing sterile pharmaceutical grade water, saline or dextrose/water. Where the composition is administered by injection, an ampule of sterile water for injection or saline can be provided so that the ingredients may be mixed prior to administration.

[0131] For topical application, nonsprayable forms, viscous to semi-solid or solid forms comprising a carrier compatible with topical application and having a dynamic viscosity preferably greater than water, can be employed. Suitable formulations include but are not limited to solutions, suspensions, emulsions, creams, ointments, powders, enemas, lotions, sols, liniments, salves, aerosols, etc., which are, if desired, sterilized or mixed with auxiliary agents, e.g., preservatives, stabilizers, wetting agents, buffers or salts for influencing osmotic pressure, etc. The agent may be incorporated into a cosmetic formulation. For topical application, also suitable are sprayable aerosol preparations wherein the active ingredient, preferably in combination with a solid or liquid inert carrier material, is packaged in a squeeze bottle or in admixture with a pressurized volatile, normally gaseous propellant, e.g., pressurized air.

[0132] Agents described herein can be formulated as neutral or salt forms. Pharmaceutically acceptable salts include those formed with free amino groups such as those derived from hydrochloric, phosphoric, acetic, oxalic, tartaric acids, etc., and those formed with free carboxyl groups such as those derived from sodium, potassium, ammonium, calcium, ferric hydroxides, isopropylamine, triethylamine, 2-ethylamino ethanol, histidine, procaine, etc.

[0133] The agents are administered in a therapeutically effective amount. The amount of agents which will be therapeutically effective in the treatment of a particular disorder or condition will depend on the nature of the disorder or condition, and can be determined by standard clinical techniques. In addition, in vitro or in vivo assays may optionally be employed to help identify optimal dosage ranges. The precise dose to be employed in the formulation will also depend on the route of administration, and the seriousness of the symptoms of schizophrenia, and should be decided according to the judgment of a practitioner and each patient's circumstances. Effective doses may be extrapolated from dose-response curves derived from in vitro or animal model test systems.

[0134] The invention also provides a pharmaceutical pack or kit comprising one or more containers filled with one or more of the ingredients of the pharmaceutical compositions of the invention. Optionally associated with such container(s) can be a notice in the form prescribed by a governmental agency regulating the manufacture, use or sale of pharmaceuticals or biological products, which notice reflects approval by the agency of manufacture, use of sale for human administration. The pack or kit can be labeled with information regarding mode of administration, sequence of drug administration (e.g., separately, sequentially or concurrently), or the like. The pack or kit may also include means for reminding the patient to take the therapy. The pack or kit can be a single unit dosage of the combination therapy or it can be a plurality of unit dosages. In particular, the agents can be separated, mixed together in any combination, present in a single vial or tablet. Agents assembled in a blister pack or other dispensing means is preferred. For the purpose of this invention, unit dosage is intended to mean a dosage that is dependent on the individual pharmacodynamics of each agent and administered in FDA approved dosages in standard time courses.

[0135] Methods of Therapy

[0136] The present invention also pertains to methods of treatment (prophylactic and/or therapeutic) for schizophrenia, using an NRG1 therapeutic agent. An “NRG1 therapeutic agent” is an agent, used for the treatment of schizophrenia, that alters (e.g., enhances or inhibits) NRG1 polypeptide activity and/or neuregulin 1 gene expression, as described herein (e.g., an NRG1 agonist or antagonist). NRG1 therapeutic agents can alter NRG1 polypeptide activity or gene expression by a variety of means, such as, for example, by providing additional NRG1 polypeptide or by upregulating the transcription or translation of NRG1; by altering posttranslational processing of the NRG1 polypeptide; by altering transcription of NRG1 splicing variants; by interfering with NRG1 polypeptide activity (e.g., by binding to an NRG1 polypeptide); by altering the interaction between NRG1 polypeptide and an NRG1 polypeptide binding agent (e.g., a receptor); by altering the activity of an NRG1 polypeptide binding agent; or by downregulating the transcription or translation of NRG1. Representative NRG1 therapeutic agents include the following:
[0137] nucleic acids or fragments or derivatives thereof described herein, particularly nucleotides encoding the polypeptides described herein and vectors comprising such nucleic acids (e.g., a gene, cDNA, and/or mRNA, such as a nucleic acid encoding an NRG1 polypeptide or active fragment or derivative thereof, or an oligonucleotide; for example, SEQ ID NO: 1 or a nucleic acid encoding any one (or more) of SEQ ID NO: 2-5 or 10-39, or fragments or derivatives thereof);
[0138] polypeptides described herein (e.g., one or more of SEQ ID NO: 2-5 or 10-39, and/or other splicing variants encoded by NRG1, or fragments or derivatives thereof);
[0139] other polypeptides (e.g., NRG1 receptors, such as ErbB receptors, including ErbB2, ErbB3, ErbB4; enzymatically active fragments of ErbB receptors (i.e., fragments that demonstrate the enzymatic activity of the ErbB receptor) and particularly of the ErbB4 receptor such as fragment (1) (aa 713-988), fragment (2) (aa 676-1308), fragment (3) (aa 676-1030), fragment 4 (aa 676-1119), fragment (5) (aa 676-1213), and/or fragment (6) (aa 676-1308), as described below, or derivatives thereof; and heterodimers of ErbB2/ErbB4, ErbB2/ErbB3 and ErbB3/ErbB4, including heterodimers of fragments of ErbB2, ErbB3, and/or ErbB4, particularly enzymatically active fragments thereof);
[0140] NRG1 binding agents; peptidomimetics; fusion proteins or prodrugs thereof; antibodies (e.g., an antibody to a mutant NRG1 polypeptide, or an antibody to a non-mutant NRG1 polypeptide, or an antibody to a particular splicing variant encoded by NRG1, as described above); ribozymes; other small molecules;
[0141] agents that alter interaction between NRG1 polypeptide and an NRG1 polypeptide binding agent (e.g., an agent that alters interaction between NRG1 polypeptide and ErbB4 receptor); agents that alter activity of an NRG1 polypeptide binding agent (e.g., an agent that alters (e.g., enhances or inhibits) expression and/or activity of an NRG1 polypeptide binding agent, for example, an agent that enhances activity of ErbB4);
[0142] and other agents that alter (e.g., enhance or inhibit) neuregulin 1 gene expression or polypeptide activity, that alter posttranslational processing of the NRG1 polypeptide, or that regulate transcription of NRG1 splicing variants (e.g., agents that affect which splicing variants are expressed, or that affect the amount of each splicing variant that is expressed).

[0143] In a preferred embodiment, the NRG1 therapeutic agent is a nucleic acid encoding one or more NRG1 polypeptides (e.g., encoding one or more of SEQ ID NO: 2-5 or 10-39, or a fragment or derivative thereof); in another preferred embodiment, the NRG1 therapeutic agent is a nucleic acid comprising a fragment of NRG1 (e.g., comprising a fragment of SEQ ID NO: 1, or a derivative thereof), such as a regulatory region of NRG1; in yet another preferred embodiment, the NRG1 therapeutic agent is a nucleic acid comprising the NRG1 regulatory region and also a nucleic acid encoding one or more NRG1 polypeptides (or fragments or derivatives thereof).

[0144] More than one NRG1 therapeutic agent can be used concurrently, if desired.

[0145] The NRG1 therapeutic agent that is a nucleic acid is used in the treatment of schizophrenia. The term, “treatment” as used herein, refers not only to ameliorating symptoms associated with the disease, but also preventing or delaying the onset of the disease, and also lessening the severity or frequency of symptoms of the disease. The therapy is designed to alter (e.g., inhibit or enhance), replace or supplement activity of an NRG1 polypeptide in an individual. For example, an NRG1 therapeutic agent can be administered in order to upregulate or increase the expression or availability of the neuregulin 1 gene or of specific splicing variants of NRG1, or, conversely, to downregulate or decrease the expression or availability of the neuregulin 1 gene or specific splicing variants of NRG1. Upregulation or increasing expression or availability of a native NRG1 or of a particular splicing variant could interfere with or compensate for the expression or activity of a defective gene or another splicing variant; downregulation or decreasing expression or availability of a native NRG1 or of a particular splicing variant could minimize the expression or activity of a defective gene or the particular splicing variant and thereby minimize the impact of the defective gene or the particular splicing variant.

[0146] The NRG1 therapeutic agent(s) are administered in a therapeutically effective amount (i.e., an amount that is sufficient to treat the disease, such as by ameliorating symptoms associated with the disease, preventing or delaying the onset of the disease, and/or also lessening the severity or frequency of symptoms of the disease). The amount which will be therapeutically effective in the treatment of a particular individual's disorder or condition will depend on the symptoms and severity of the disease, and can be determined by standard clinical techniques. In addition, in vitro or in vivo assays may optionally be employed to help identify optimal dosage ranges. The precise dose to be employed in the formulation will also depend on the route of administration, and the seriousness of the disease or disorder, and should be decided according to the judgment of a practitioner and each patient's circumstances. Effective doses may be extrapolated from dose-response curves derived from in vitro or animal model test systems.

[0147] In one embodiment, a nucleic acid of the invention (e.g., a nucleic acid encoding an NRG1 polypeptide, such as SEQ ID NO: 1; or another nucleic acid that encodes an NRG1 polypeptide or a splicing variant, derivative or fragment thereof, such as a nucleic acid encoding any one or more of SEQ ID NO: 2-5 or 10-39) can be used, either alone or in a pharmaceutical composition as described above. For example, NRG1 or a cDNA encoding the NRG1 polypeptide, either by itself or included within a vector, can be introduced into cells (either in vitro or in vivo) such that the cells produce native NRG1 polypeptide. If necessary, cells that have been transformed with the gene or cDNA or a vector comprising the gene or cDNA can be introduced (or re-introduced) into an individual affected with the disease. Thus, cells which, in nature, lack native NRG1 expression and activity, or have mutant NRG1 expression and activity, or have expression of a disease-associated NRG1 splicing variant, can be engineered to express NRG1 polypeptide or an active fragment of the NRG1 polypeptide (or a different variant of NRG1 polypeptide). In a preferred embodiment, nucleic acid encoding the NRG1 polypeptide, or an active fragment or derivative thereof, can be introduced into an expression vector, such as a viral vector, and the vector can be introduced into appropriate cells in an animal. Other gene transfer systems, including viral and nonviral transfer systems, can be used. Alternatively, nonviral gene transfer methods, such as calcium phosphate coprecipitation, mechanical techniques (e.g., microinjection); membrane fusion-mediated transfer via liposomes; or direct DNA uptake, can also be used.

[0148] Alternatively, in another embodiment of the invention, a nucleic acid of the invention; a nucleic acid complementary to a nucleic acid of the invention; or a portion of such a nucleic acid (e.g., an oligonucleotide as described below), can be used in “antisense” therapy, in which a nucleic acid (e.g., an oligonucleotide) which specifically hybridizes to the mRNA and/or genomic DNA of NRG1 is administered or generated in situ. The antisense nucleic acid that specifically hybridizes to the mRNA and/or DNA inhibits expression of the NRG1 polypeptide, e.g., by inhibiting translation and/or transcription. Binding of the antisense nucleic acid can be by conventional base pair complementarity, or, for example, in the case of binding to DNA duplexes, through specific interaction in the major groove of the double helix.

[0149] An antisense construct of the present invention can be delivered, for example, as an expression plasmid as described above. When the plasmid is transcribed in the cell, it produces RNA which is complementary to a portion of the mRNA and/or DNA which encodes NRG1 polypeptide. Alternatively, the antisense construct can be an oligonucleotide probe which is generated ex vivo and introduced into cells; it then inhibits expression by hybridizing with the mRNA and/or genomic DNA of NRG1. In one embodiment, the oligonucleotide probes are modified oligonucleotides which are resistant to endogenous nucleases, e.g. exonucleases and/or endonucleases, thereby rendering them stable in vivo. Exemplary nucleic acid molecules for use as antisense oligonucleotides are phosphoramidate, phosphothioate and methylphosphonate analogs of DNA (see also U.S. Pat. Nos. 5,176,996; 5,264,564; and 5,256,775). Additionally, general approaches to constructing oligomers useful in antisense therapy are also described, for example, by Van der Krol et al. ((1988) Biotechniques 6:958-976); and Stein et al. ((1988) Cancer Res 48:2659-2668). With respect to antisense DNA, oligodeoxyribonucleotides derived from the translation initiation site, e.g. between the −10 and +10 regions of NRG1 sequence, are preferred.

[0150] To perform antisense therapy, oligonucleotides (mRNA, cDNA or DNA) are designed that are complementary to mRNA encoding NRG1. The antisense oligonucleotides bind to NRG1 mRNA transcripts and prevent translation. Absolute complementarity, although preferred, is not required. A sequence “complementary” to a portion of an RNA, as referred to herein, indicates that a sequence has sufficient complementarity to be able to hybridize with the RNA, forming a stable duplex; in the case of double-stranded antisense nucleic acids, a single strand of the duplex DNA may thus be tested, or triplex formation may be assayed. The ability to hybridize will depend on both the degree of complementarity and the length of the antisense nucleic acid, as described in detail above. Generally, the longer the hybridizing nucleic acid, the more base mismatches with an RNA it may contain and still form a stable duplex (or triplex, as the case may be). One skilled in the art can ascertain a tolerable degree of mismatch by use of standard procedures.

[0151] The oligonucleotides used in antisense therapy can be DNA, RNA, or chimeric mixtures or derivatives or modified versions thereof, single-stranded or double-stranded. The oligonucleotides can be modified at the base moiety, sugar moiety, or phosphate backbone, for example, to improve stability of the molecule, hybridization, etc. The oligonucleotides can include other appended groups such as peptides (e.g. for targeting host cell receptors in vivo), or agents facilitating transport across the cell membrane (see, e.g., Letsinger et al. (1989) Proc. Natl. Acad. Sci. USA 86:6553-6556; Lemaitre et al., (1987), Proc. Natl. Acad. Sci. USA 84:648-652; PCT International Publication No. WO88/09810) or the blood-brain barrier (see, e.g., PCT International Publication No. WO89/10134), or hybridization-triggered cleavage agents (see, e.g., Krol et al. (1988) BioTechniques 6:958-976) or intercalating agents. (See, e.g., Zon, (1988), Pharm. Res. 5:539-549). To this end, the oligonucleotide may be conjugated to another molecule (e.g., a peptide, hybridization triggered cross-linking agent, transport agent, hybridization-triggered cleavage agent).

[0152] The antisense molecules are delivered to cells which express NRG1 in vivo. A number of methods can be used for delivering antisense DNA or RNA to cells; e.g., antisense molecules can be injected directly into the tissue site, or modified antisense molecules, designed to target the desired cells (e.g., antisense linked to peptides or antibodies that specifically bind receptors or antigens expressed on the target cell surface) can be administered systematically. Alternatively, in a preferred embodiment, a recombinant DNA construct is utilized in which the antisense oligonucleotide is placed under the control of a strong promoter (e.g., pol III or pol II). The use of such a construct to transfect target cells in the patient results in the transcription of sufficient amounts of single stranded RNAs that will form complementary base pairs with the endogenous NRG1 transcripts and thereby prevent translation of the NRG1 mRNA. For example, a vector can be introduced in vivo such that it is taken up by a cell and directs the transcription of an antisense RNA. Such a vector can remain episomal or become chromosomally integrated, as long as it can be transcribed to produce the desired antisense RNA. Such vectors can be constructed by recombinant DNA technology methods standard in the art and described above. For example, a plasmid, cosmid, YAC or viral vector can be used to prepare the recombinant DNA construct which can be introduced directly into the tissue site. Alternatively, viral vectors can be used which selectively infect the desired tissue, in which case administration may be accomplished by another route (e.g., systematically).

[0153] Endogenous NRG1 expression can also be reduced by inactivating or “knocking out” NRG1 or its promoter using targeted homologous recombination (e.g., see Smithies et al. (1985) Nature 317:230-234; Thomas & Capecchi (1987) Cell 51:503-512; Thompson et al. (1989) Cell 5:313-321). For example, a mutant, non-functional NRG1 (or a completely unrelated DNA sequence) flanked by DNA homologous to the endogenous NRG1 (either the coding regions or regulatory regions of NRG1) can be used, with or without a selectable marker and/or a negative selectable marker, to transfect cells that express NRG1 in vivo. Insertion of the DNA construct, via targeted homologous recombination, results in inactivation of NRG1. The recombinant DNA constructs can be directly administered or targeted to the required site in vivo using appropriate vectors, as described above. Alternatively, expression of non-mutant NRG1 can be increased using a similar method: targeted homologous recombination can be used to insert a DNA construct comprising a non-mutant, functional NRG1 (e.g., a gene having SEQ ID NO:1), or a portion thereof, in place of a mutant NRG1 in the cell, as described above. In another embodiment, targeted homologous recombination can be used to insert a DNA construct comprising a nucleic acid that encodes an NRG1 polypeptide variant that differs from that present in the cell.

[0154] Alternatively, endogenous NRG1 expression can be reduced by targeting deoxyribonucleotide sequences complementary to the regulatory region of NRG1 (i.e., the NRG1 promoter and/or enhancers) to form triple helical structures that prevent transcription of NRG1 in target cells in the body. (See generally, Helene, C. (1991) Anticancer Drug Des., 6(6):569-84; Helene, C., et al. (1992) Ann, N.Y. Acad. Sci., 660:27-36; and Maher, L. J. (1992) Bioassays 14(12):807-15). Likewise, the antisense constructs described herein, by antagonizing the normal biological activity of one of the NRG1 proteins, can be used in the manipulation of tissue, e.g. tissue differentiation, both in vivo and for ex vivo tissue cultures. Furthermore, the anti-sense techniques (e.g. microinjection of antisense molecules, or transfection with plasmids whose transcripts are anti-sense with regard to an NRG1 mRNA or gene sequence) can be used to investigate role of NRG1 in developmental events, as well as the normal cellular function of NRG1 in adult tissue. Such techniques can be utilized in cell culture, but can also be used in the creation of transgenic animals.

[0155] In yet another embodiment of the invention, other NRG1 therapeutic agents as described herein can also be used in the treatment or prevention of schizophrenia. The therapeutic agents can be delivered in a composition, as described above, or by themselves. They can be administered systemically, or can be targeted to a particular tissue. The therapeutic agents can be produced by a variety of means, including chemical synthesis; recombinant production; in vivo production (e.g., a transgenic animal, such as U.S. Pat. No. 4,873,316 to Meade et al.), for example, and can be isolated using standard means such as those described herein.

[0156] A combination of any of the above methods of treatment (e.g., administration of non-mutant NRG1 polypeptide in conjunction with antisense therapy targeting mutant NRG1 mRNA; administration of a first splicing variant encoded by NRG1 in conjunction with antisense therapy targeting a second splicing variant encoded by NRG1), can also be used.

Use of ErbB4 and NRG1 Hypomorph Mice

[0157] As described in the Examples below, ErbB4 hypomorphic mice and NRG1-TM hypomorphic mice demonstrate a behavioral phenotype (hyperactivity) that overlaps with the behavioral phenotype of other pharmacological and mutant mouse models of schizophrenia. This behavioral phenotype is reversible with clozapine, an atypical antipsychotic drug. As a result of this discovery, methods are now available to assess agents for neuroleptic activity, and to identify potential therapeutic agents for treatment of schizophrenia, using such hypomorphic mice. The present invention thus also pertains to methods for assessing neuroleptic activity of an agent of interest, as well as methods for identifying potential therapeutic agents for treatment of schizophrenia, comprising administering the agent of interest to a mouse that is hypomorphic for ErbB4 or NRG1. In addition, ErbB4 and NRG1 hypomorphic mice can be used to identify and study phenotypes associated with schizophrenia.

[0158] “Neuroleptic” activity, as used herein, refers to the ability of an agent of interest to treat (e.g., control, reduce, or prevent) psychosis or act as an antipsychotic agent: that is, to control or prevent symptoms of psychosis or to treat mental disorders whose manifestations include psychotic symptoms such as hallucinations or delusions.

[0159] A “hypomorph,” as used herein, refers to a mutant gene (herein referred to as an “affected” gene) having a similar but altered (weaker) effect, compared with the corresponding wild-type gene. A hypomorphic mouse thus has a mutation in the gene of interest (e.g., ErbB4, neuregulin 1) that affects the expression or structure of the protein encoded by the gene, and thereby affects the activity of the protein encoded by the gene. Such mutations can include null alleles or knockouts. The hypomorphic mouse can be heterozygous for the mutation, or homozygous. A “wild type” mouse, as used herein, refers to a mouse that is wild type for the gene that is affected in the hypomorphic mouse. In one embodiment, the hypomorphic mouse has a mutation in the ErbB4 gene. In another embodiment, the hypomorphic mouse has a mutation in the neuregulin gene. In a preferred embodiment, the hyopmorphic mouse has a mutation in the transmembrane (TM) region of the neuregulin gene. A hypomorphic mouse can be generated using techniques such as those described above in relation to transgenic mice.

[0160] In the methods of the invention, the behavior of the hypomorphic mice is assessed. Hypomorphic mice described herein (e.g., ErbB4 hypomorphs, neuregulin 1 hypomorphs) demonstrate abnormal behavior, compared with the behavior of wild-type mice. The term, “abnormal behavior,” as used herein, refers to behavior which statistically differs from wild-type animals which are similarly treated. Abnormal behavior can include a variety of standard behaviors which can be objectively measured and statistically compared, including ataxia, rapid limb movement, eye movement, breathing, motor activity, cognition, emotional behaviors and social behaviors. In a preferred embodiment, the abnormal behaviors correlate with schizophrenic behaviors in humans, such as hyperactivity and abnormal social interaction.

[0161] Behaviors of the mice can be assessed using standard tests well-known by those skilled in the art. In preferred embodiments, behaviors that are assessed include hyperactivity, social interaction, and pre-pulse inhibition. Representative tests of rodent behavior are described below. For additional description of such tests as well as other representative tests of rodent behavior, see, for example, U.S. Pat. No. 5,549,884, the teachings of which are incorporated by reference herein in their entirety.

[0162] For a swim test, the animal is immersed in water for a set period of time and locomotor activity (e.g., distance traveled) is assessed. Locomotor activity can be measured by direct observation and/or through the use of automatic photocell monitor. For an isolation test, the animal is housed in a cage without any sensory contact and abnormal behaviors are measured in terms of activity (e.g., distance traveled), learning (e.g., number of correct responses when placed in a maze), and emotionality (e.g., aggressiveness). For a social interaction test, the animal is exposed to other animals in a variety of settings and subsequent social behaviors (e.g., touching, climbing, sniffing and mating) are assessed. For a pre-pulse inhibition of startle response test, the animal is exposed to a sensory stimulus, and the startle responses of the animal to similar acoustic or tactile stimuli are measured. For a novelty test, the animal is exposed a novel environment and/or novel objects, and the animal's behavior (e.g., motor behavior) in the novel environment and/or around the novel object are assessed. For a stimulant-induced hyperactivity test, stimulant drugs (e.g., amphetamines, cocaine, PCP, etc.), are administered to the animal, and behavior (e.g., motor activity, social interactions, cognitive behavior) is assessed. For a spatial learning test, the animal is exposed to a complex novel environment, and the rapidity and extent of spatial learning is assessed. For an open field test, the animal is exposed to a variety of test arenas under low lighting conditions, and the activity of the animal (e.g., locomotion, total distance traveled, rearing, number of center entries, and percent time spent in the center area and periphery of the test arena) is assessed. In a preferred embodiment, an open field test is used.

[0163] Statistical analysis of the various behaviors measured can be carried out using any standard statistical programs routinely used by those skilled in the art (such as, for example, ANOVA). Generally, a P value less than 0.05, i.e., P<0.05, is considered to be statistically significant. To analyze abnormal behavior, a comparison is made between the behavior of a hypomorphic mammal and the behavior of a wild-type animal.

[0164] In one embodiment of the methods of the invention, an agent of interest is administered to an ErbB4 or neuregulin 1 hypomorphic mouse. An “agent of interest,” as the term is used herein, refers to an agent to be assessed for neuroleptic activity. Representative agents include known neuroleptic agents (e.g., “typical” neuroleptics, such as promazine, triflurpromazine, chlorpramazine, chlorprothixene, thioridazine, mesoridazine, droperidol, acetophenazine, loxapine, molindone, perphenazine, prochlorperazine, thiothixens, trifluoperazine, fluphenazine, halperidol, pimozide, flupenthixol, methotrimeprazine, pipotiazine; and “atypical” neuroleptics, such as clozapine, risperidone, olanzapine, quetiapine, sertindone, ziprasidone, iloperidone), as well as other agents whose neuroleptic activity is not yet known.

[0165] In another embodiment of the methods of the invention, an agent of interest is administered to assess whether it is a potential therapeutic agent for the treatment of schizophrenia. A “potential therapeutic agent,” as that term is used herein, refers to an agent that may have therapeutic value for the treatment of schizophrenia: that is, the agent may control, reduce, or prevent manifestations of schizophrenia that include hallucinations or delusions. Administration of an agent (clozapine) that is used to treat schizophrenia, to ErbB4 hypomorphic mice and to neuregulin 1 hypomorphic mice, reduces an abnormal behavior (hyperactivity) that is associated with schizophrenia phenotype in humans. Thus, it is anticipated that other agents that similarly reduce the abnormal behavior in ErbB4 hypomorphic mice and to neuregulin 1 hypomorphic mice will likewise be useful to treat schizophrenia.

[0166] The behavior of the hypomorphic mouse is then assessed, and compared with the behavior of a hypomorphic mouse that has not been administered the agent of interest. A decrease in abnormal behavior, by an amount that is statistically significant, in the hypomorphic mouse that has been administered the agent of interest, is indicative of neuroleptic activity of the agent of interest, or is indicative that the agent is a potential therapeutic agent.

[0167] In another embodiment of the invention, ErbB4 and NRG1 hypomorphic mice can be used to identify and study phenotypes associated with schizophrenia. Because the NRG1-TM hypomorphic mouse and the ErbB4 hypomorphic mouse, as described herein, demonstrated abnormal behavior (hyperactivity) that is associated with schizophrenia phenotype in humans, and that is reduced by administration of an agent that is used to treat schizophrenia, other NRG1 hypomorphic mice and ErbB4 hypomorphic mice (those having different mutations in the NRG1 gene or the ErbB4 gene) are likely to demonstrate other abnormal behaviors similarly associated with schizophrenia phenotype that can similarly be reduced by administration of an agent that is used to treat schizophrenia.

[0168] The invention will be further described by the following non-limiting examples. The teachings of all publications cited herein are incorporated herein by reference in their entirety.

### EXEMPLIFICATION

### Example 1

Identification of Gene with Linkage to Schizophrenia

Patient Population

[0169] The lifetime expectancy of schizophrenia in Iceland is similar to what has been observed in the neighboring countries, 0.6% for males and 0.9% for females. A team of seven psychiatrists who diagnose patients and confirm the diagnosis of previously diagnosed schizophrenics and collect samples was employed. Each psychiatrist interviewed, using the Schedule for Schizophrenia and Affective Disorders, lifetime version (SADS-L) (Endicott, J. and Spitzer, R. L., Arch. Gen. Psychiatry 35:837 (1978)). The information from the SADS-L interviews was then used to classify all cases in accordance with research diagnostic criteria (RDC) and the Diagnosis and Statistical Manual of Mental Disorders, third edition, revised (DMS III-R). Furthermore, the operational criteria OPCRIT checklist for psychotic illness was also used to facilitate a polydiagnostic approach to psychotic illness (McGuffin, P. et al., Arch. Gen Psychiatry 48(8):764-70 (1991)).

Construction of a BAC Contig

[0170] A BAC (bacterial artificial chromosome) contig for the region of interest was generated using the RCPI-11 Human BAC library (Pieter deJong, Roswell Park). BACs were identified by hybridization using available STS markers and microsatellite markers in the region, followed by successive rounds of hybridization using markers designed from BAC end sequences. Hybridization results were confirmed and the order of the BACs determined by PCR using all available markers in the region. BAC fingerprint data complemented these data. Fingerprints of positive clones (FPCs) were analysed using the FPC database developed at the Wellcome Trust Sanger Institute. New microsatellite markers were discovered from cloning and screening fragments from nebulized BACs. The primary goal was to achieve a high resolution ordering of the microsatellite markers.

Search for New Microsatellite Markers

[0171] BACs were shotgun cloned and gridded onto membranes. Clones containing microsatellite repeats were identified by hybridization with oligonucleotide probes consisting of microsatellite repeat sequences. Positive clones were analyzed by sequencing and primers designed to amplify the microsatellites.

DNA Sequencing

[0172] Nine BACs, covering the minimum tiling path of the region of interest, were analyzed by shotgun cloning and sequencing. Dye terminator (ABI PRISM BigDye™) chemistry was used for fluorescent automated DNA sequencing. ABI prism 377 sequencers were used to collect data and the Phred/Phrap/Consed software package in combination with the Polyphred software were used to assemble sequences.

Search for Exons in Sequence Databases

[0173] Exons/genes were searched for by BLAST alignment to DNA and protein databases.

Search for New Exons in cDNA Libraries

[0174] We identified syntenic mouse BACs (20) (library RPCI-23) and by BAC walking a contig across the NRG1 locus was made. The methods described above were used to subclone and sequence 8 syntenic BAC clones from the mouse. The mouse sequence was used to identify more exons and potential regulatory elements. Both 3 and 5 RACE (rapid amplification of cDNA ends) were carried out using the Marathon-Ready™ cDNA from Clontech laboratories Inc. and cDNA libraries made at deCODE genetics. cDNA libraries from whole brain, fetal brain and testis were used.

Search for New Exons Using Exon Prediction Tools

[0175] Gene miner software (deCODE genetics) was used to predict where exons were in our 1.5 Mb sequence. Primers for amplifying these candidate exons from cDNA libraries were designed, touch down PCRs were carried out, and the products were verified by sequencing. Exon sequences and sequences 2 kb upstream of each transcription start site from 184 patients were analysed for SNP detection. Conserved regions mouse:human (potential regulatory elements) showing 80% identity over 100 bp and longer were screened in 94 patients. SNPs were scored using a fluorescent based method (Chen, et al., Genome Res. 9, 492 (1999)).

Trapping Exons

[0176] Exons were “trapped” by using the Exon trapping kit from Live technologies. Primers were designed for amplifying these candidate exons from cDNA libraries, touch down PCRs were carried out, and the products were verified by sequencing.

Genome-Wide Scan

[0177] Samples from affected individuals related within 6 meiotic events, 260 affected individuals and 334 associated relatives, have been genotyped using a marker set of 950 microsatellite markers. One locus, 8p21-8p11, was reexamined with additional 150 follow-up markers. In addition to the 260 affected individuals and their relatives in the genome wide scan, 132 affected individuals and 147 available relatives were also genotyped using the 150 microsatellite markers for the 8p21-p12 locus.

Statistical Analysis

[0178] A linkage analysis was performed with the Allegro software. FIG. 1 displays the results for the Allele-Sharing Model using the CS affected pedigree (158 affected individuals, maximum distance of 5 meiotic events between affected individuals).

Physical Mapping of the Probable Schizophrenic Locus (Locus on 8p21-p12)

[0179] The most significant locus that was found, with a maximum LOD score near 3, was physically mapped using bacterial artificial chromosomes (BACs). Initially the locus was wide, around 30 cM. Only a small fraction of this region had been sequenced previously, with the total cumulative number of bases of around 5 Mb. The published order of markers in the region was not correct and most of the polymorphic markers known in this region had not been radiation hybrid mapped. The primary goal with the BAC map was to achieve a high-resolution ordering (100 to 150 kb) of all polymorphic markers in this region and search for new polymorphic markers.

[0180] By screening BAC libraries with primers from the region, 3000 BACs were retrieved by hybridization and PCR methods. Contig mapping was performed; 940 of these clones were assigned by PCR and hybridization to contigs. In addition, 252 additional BACs were assigned to contigs based on fingerprint analysis (a total of 1192 BAC clones have been assigned to contigs). After correcting the marker order the maximum lod score is 3.1 (FIG. 1). The order of 534 markers in the 30 cM BAC area covered by the BAC contig has now been determined. The physical map has allowed the ordering and placement of polymorphic microsatellite markers and STS markers. BACs were subcloned from the BAC contig and searched for new microsatellites by hybridization. Samples were genotyped using, on average, a polymorphic microsatellite marker every 0.17 cM throughout the locus. Microsatellites are set forth in Tables 2 and 3.

[0181] As a result of the physical mapping effort the locus was narrowed to approximately 20 cM. This 20 cM region was spanned by four big contigs, 2-10 Mb each. The main peak extended over 7 cM and this region resided in one BAC contig. The four contigs were correctly ordered based on data from radiation hybrid mapped markers in these contigs, yeast artificial chromosomes (YAC) maps and by comparing haplotypes within families. Now that the marker order has been corrected, as described herein, the densely mapped markers can be used to reconstruct more correct haplotypes and search for at-risk haplotypes giving substantial overlap between families.

Identification of At-Risk Haplotypes

Locus 8p21-p12

[0182] Using genotypes for the densely mapped markers, haplotypes of the affected individuals were constructed, and candidate at-risk haplotypes which are carried by three or more affected individuals within each individual family were identified. By comparing these candidate haplotypes across families, it was found that some of these haplotypes have substantial overlap (FIG. 2). The core of the haplotype found in affected individuals (6 markers telomeric to D8S1810, 0.3 Mb) was found in 10% of the patients (37 out of 746 chromosomes investigated). In comparison, 3% of controls had this haplotype (6 out of 376). FIG. 2 shows 44 patient haplotypes having a part of this at-risk haplotype. FIG. 3 shows an overview of the order of sequenced BACS and the boundaries for the at-risk haplotypes at locus 8p12.

[0183] The results from the linkage and haplotype analyses strongly suggested the presence of a disease-susceptibility gene residing in a 1.5 Mb segment at 8p12, harboring exons from the gene, neuregulin 1 (NRG1) and from a new gene, neuregulin-1-associated gene 1 (NRG1AG1). The gene for neuregulin 1-associated gene 1 (NRG1AG1) is described further in U.S. patent application Ser. Nos. 09/515,715 and 09/795,686, entitled “Human Schizophrenia Gene,” and incorporated herein by reference in their entirety.

The Sequence of the Candidate Region

Locus 8p12

[0184] Sequencing of 1.5 Mb of the BAC contig on 8p12 where candidate haplotypes showed substantial overlap between families. This sequence was in one contig and harbors a very interesting candidate gene, Neuregulin 1 (NRG1).

Gene Identification

Locus 8p12

[0185] Neuregulin 1 is a well characterized gene from which many splice forms have been investigated. A depiction of the exons, single nucleotide polymorphisms (SNPs), and exons is presented in FIG. 4. New exons and splice variants for Neuregulin 1 have been identified by screening cDNA libraries. The gene and its splice variants are shown in the sequence listing and Table 1.

[0186] Neuregulin 1 associated gene 1 is a new gene and known protein sequences do not show significant homology to this new gene. A depiction of the exons, single nucleotide polymorphisms (SNPs), and deletions and insertions is presented in Tables 2 and 3. Since this gene is within the Neuregulin gene and located within the 1.5 Mb region defined by the at-risk haplotypes, it is also a strong candidate gene for schizophrenia.

[0187] We have screened all known and novel exons of NRGL (N=28) and EST cluster Hs.97362 (N=8) and identified 15 non-synonymous SNPs for NRG1 and 3 in the EST cluster Hs.97362. We have identified 2 synonymous SNPs and 7 SNPs in the untranslated part of NRG1 and 1 synonymous SNP and 4 SNPs in untranslated regions of EST cluster Hs.97362. A total of more than 1200 SNPs have been identified in the entire NRG1 sequence. All coding SNPs and a number of SNPs in promoter regions were genotyped for 394 unrelated controls and 478 patients. Furthermore, a number of SNPs identified in conserved regions were also scored. A total of 58 SNPs were genotyped for all patients and in a subset of patients (N=94) and controls (N=124) an additional 123 SNPs were scored for association. A few SNP alleles showed mild but significant single marker associations but they do not change amino acids or splice sites.

[0188] While no single SNP or microsatellite gave significant excess in the patients (after accounting for multiple testing), a core haplotype consisting of 5 SNPs and 2 microsatellite markers was identified (P value between 6.7×10-6* and 8.7×10-5) (FIG. 6). This core covers 290 kb and represents a block of linkage disequilibrium. Close to 90% of this core haplotype can be accounted for by four extended haplotypes involving 16 markers (FIG. 6). Interestingly, while HapA in FIG. 6 corresponds to the extended microsatellite haplotype I in FIG. 5 identified in the linkage families, HapB and HapC (1 and 2), apart from having common alleles for microsatellite markers 478B14-848 and 420M9-1395, tend to have different alleles for many of the microsatellite markers (not all shown in FIG. 6). Indeed, at various intermediate stages before we realized they share a core, HapA, HapB and HapC (1 and 2) were each considered as independent at-risk haplotypes showing significant excess in the patients relative to the controls (FIG. 6). The estimates of their risks relative to the wild type are also comparable or around two for HapA and HapB, higher for HapC but the estimate for HapC is based on small numbers (FIG. 6). Hence we believe that this core haplotype is capturing an ancestral at-risk haplotype that is represented by a number of extended microsatellite/SNP haplotypes in the current population. FIG. 6 shows the likely locations of historic recombination breakpoints and also reveals that the microsatellite marker D8S 1810 has probably mutated since the at-risk SNP haplotype was formed. Haplotypes derived using information from relatives of patients and controls agreed with these haplotypes derived using the likelihood approach.

[0189] The core at-risk haplotype has estimated frequency of 7.5% in the general population and 15.4% among all schizophrenia patients. Assuming a multiplicative model, individuals are estimated to have 2.2 times the risk relative to the wild type for each at-risk haplotype evaluated. To supplement the results from the case-control study, we performed the transmission disequilibrium test (TDT was performed for probands where both parents are genotyped and one or both are heterozygous for the at-risk haplotype (Spielman, et al., Am. J. Hum. Genet. 52, 506 (1993)) and found that for parents who were heterozygous with respect to the core haplotype, there were 33 transmissions to the affected offsprings and 17 non-transmissions (P=0.016). While these results are only marginally significant due to the small sample size (parents were not available for genotyping in many cases), it is heartening that the ratio of transmissions to non-transmissions is close to 2:1 which is consistent with the estimated relative risk of 2.2 based on the case-control data.

[0190] It is worth noting that the region of interest exhibits extensive linkage dis-equilibrium. The core haplotype of 7 markers can be identified by only 3 markers, one SNP and two microsatellites. Specifically, if a haplotype includes alleles 1, 0 and 0 respectively for SNP8NRG221533, 478B14-848 and 420M9-1395, then there is little uncertainty that it has the corresponding alleles for the other 4 markers. Moreover, each of HapA, HapB and HapC in FIG. 6 can be captured by only 5 markers, the three identifying the core plus microsatellite markers 29H12-121L21 and D8S1810. Also, HapA is a good surrogate for the extended microsatellite haplotype I in FIG. 5. The core at-risk haplotype does not overlap with EST cluster Hs.97362 suggesting that NRG1 is the more likely candidate gene in this region. None of the SNPs in the core haplotype is likely to be the causative SNP since no one SNP captures the same degree of association as the core haplotype, they are, therefore, more likely in linkage disequilibrium with the causative allele.

[0191] Microsatellite haplotype II (FIG. 5) was found in substantially higher frequency in patients from the linkage families than in controls (data not shown). The markers identifying this haplotype overlap with those of the core haplotype shown in FIG. 6, but the alleles are different. This haplotype is rare in controls and in the patients who were not used in the linkage analysis.

[0192] Based on the estimated frequencies and relative risks reported above, the core haplotype has a population attributed risk of 16%. It accounts for a 9% increase in risk for siblings of an affected individual. Hence its contribution to the familial risk of schizophrenia, which has been reported to have λs close to 8.6 (N. Risch, Am. J. Hum. Genet. 46, 222 (1990)), is small and cannot fully explain the linkage results we and others obtain for this region. While part of the reason could be that there are other schizophrenia susceptibility genes in the 8p region contributing to the lod scores and results from linkage analyses have the tendency to over-estimate the contribution of the gene, we believe there must be other at-risk alleles/haplotypes of NRG1, probably rarer but possibly with higher penetrance, yet to be found (e.g., microsatellite haplotype II). In addition, a high mutation rate in this gene, may account for the disparity between linkage and associated haplotypes.

Neuregulin 1 (NRG1)

[0193] Neuregulin 1 (also called ARIA, GGF2 and heregulin) are a group of polypeptide factors that arise from alternative RNA splicing of a single gene (Fischbach, G. D. and Rosen, K. M., Annu. Rev. Neurosci. 20:429-458 (1997); Orr-Urtreger, A., et al., Proc. Natl Acad. Sci. USA 90:1746-1750 (1993); see also, Corfas, G. et al., Neuron 14(1):103-15 (1995) and Meyer, D. et al., Development 124(18):3575-86 (1997)). The basic structure of neuregulin 1 includes a N-terminal region, an immunoglobulin (Ig) motif, a glycosylation-rich spacer domain, an EGF-like domain, and a cytoplasmic tail (see (Fischbach, G. D. and Rosen, K. M., Annu. Rev. Neurosci. 20:429-458 (1997); Loeb, J. A. et al., Development 126(4):781-91 (1999); and Meyer, D. et al., Development 124(18):3575-86 (1997)). The entire gene sequence of neuregulin 1, depicted herein for the first time, is shown as SEQ ID NO: 1. Splicing variants result in a variety of polypeptide sequences, for example, those sequences having SEQ ID NO: 2 through SEQ ID NO: 5 and SEQ ID NO: 10 through SEQ ID NO: 38, inclusive. Table 4 sets forth a table of splice variants. Table 4 includes eight new variants which were found by screening cDNA libraries. One of the clones which was found, clone OG-49-2 (see Table 4) is different from the previously known clones. It has a known N-terminal region, a kringle like domain, and then an ALU exon at the 3end. This clone does not have the EGF like domain as all previously known Neuregulin clones.

[0194] Neuregulin is expressed in many tissues, among others in the central nervous system (see, e.g., Corfas, G. et al., Neuron 14(1):103-115 (1995)). Neuregulin 1 gene is expected to be associated with schizophrenia for many reasons, including its role in the expression of the N-methyl-D-aspartate (NMDA) receptor, in activation of AChR gene expression as well as activation of epidermal growh factor receptors and GABA(a) receptor subunits, and also its induction of components in a G-protein signaling cascade. Each of these activities of neuregulin 1 is discussed briefly below.

[0195] Neuregulin is involved in the expression of the NMDA receptor subunits (Mohn, A. R. et al. Cell 98(4):427-36 (1999)). The NMDA receptor is made up of an NR1 subunit and selection of developmentally and regionally regulated NR2 subunits (A to D). Genetically engineered mutant (mice) expressing only 5% of the normal number of NR1 subunits display schizophrenic features and are probably the best rodent model of schizophrenia so far (id.).

[0196] Neuregulin is a potent activator of ACHR gene expression. The neural signals proposed to induce the mRNA expression of acetylcholine receptors in muscle include neuregulin (NRG). Neuregulin increases AChr expression by binding and activating erbB receptor tyrosine kinases, including the recruitment of the SH2 domain protein SCH, and subsequently activating the Ras/Raf, MAPK cascade (Lindstrom, J., Mol. Neurobiol. 15(2):193-222 (1997)). Pathogenic roles of AChRs are being discovered in many diseases involving mechanisms ranging from mutations, to autoimmune responses, and involving signs and symptoms ranging from muscle weakness to epilepsy, to neurodegenerative disease, to psychiatric disease, to nicotine addiction (id.). A dopamine hypothesis of schizophrenia suggests that it is caused by excess dopamine. Some similar symptoms can be caused by drugs like PCB that act as channel blockers for glutamate receptors and AchRs. A high proportion of schizophrenics are intense tobacco users. It has been suggested that they may be attempting to self medicate. Mutation in the neuregulin gene may alter the expression of the AchR gene and through that mechanism cause the disease.

[0197] One important function of neuregulin is interaction with the ErbB family of receptors to assist in regulating cell growth and differentiation. For example, neuregulin activates the epidermal growth factor receptors ErbB3 and ErbB4 (Zhu, X. et al., EMBO J. 14(23):5842-8 (1995); Kornblum, H I et al., Dev. Neurosci. 22(1-2):15-24 (2000)). Expression of NRG1 and the ErbB receptors in the developing nervous system is indicative of their role in neural development, including the regulation of cell fate specification, proliferation and survival in the neural crest lineage. Recent evidence indicates that ErbB3 and ErbB4 play an important role in the development of the CNS. Some theories on the causes of schizophrenia postulate that the disease is caused by defective brain development and there are studies that support the presence of neuro developmental abnormalities in schizophrenia (Kornblum, H. I. et al., Dev. Neurosci. 22(1-2):16-24 (2000)).

[0198] Neuregulin induces the expression of the GABA(A) receptor beta2 subunit. This increase in subunit expression is paralleled by an increase in functional GABA(A) receptors (Rieff, H. I. et al., J. Neurosci. 19(24):10757-66 (1999)). One hypothesis is that the pathophysiology of schizophrenia may be associated with a dysfunction in GABA transmission in the human prefrontal cortex. Dysfunction of the dorsolateral prefrontal cortex appears to be a central feature of the pathophysiology of schizophrenia, and this dysfunction may be related to alterations in gamma aminobutyric acid (GABA) neurotransmission (id.).

[0199] Activation of the NRG signaling pathway can induce the expression of components in a G-protein signaling cascade (Fu, A.K et al., Mol. Cell Neurosci. 14(3):241-53 (2000)). Metabotropic glutamate receptors have received considerable attention over the past decade in view of their relevance in multiple aspects of glutamatergic transmission. Recent advances in the molecular biology, pharmacology and medicinal chemistry of this family of G-protein-coupled receptors have led to therapeutic opportunities for subtype-selective modulators in brain disorders and diseases such as ischemia and schizophrenia (Richardson-Burns, S. M. et al., Biol. Psychiatry 47(1):22-8 (2000)).

[0200] The gene was identified by predicting where exons might be located in the 1.5 Mb sequence defined by the at-risk haplotypes. Primers were then designed, and cDNA libraries (Brain) were screened.

Mutation Analysis

Neuregulin (8p12)

[0201] A number of SNPs have been found in exons, including four SNPs that change an amino acid in the protein, and four SNPs that have been detected in the \acute{5} and \acute{3} untranslated regions (FIG. 4; see also Table 2). SNPs in the introns are being investigated. Several hundred SNPs have been detected in the 1.5 Mb region identified by the candidate at-risk haplotypes. SNPs, deletions and insertions are shown in Tables 2 and 3.

Bacterial Artificial Clones (BACs)

[0202] The BAC clones R-217N4, R-29H12, R-450K14, R-478B14, R-420M9, R-22F19, R-72H22, R-244L21, R-225C17, R-317J8 and R-541C15 are from the RCPI-11 Human BAC library (Pieter deJong, Roswell Park). The vector used was pBACe3.6. The clones were picked into a 94 well microtiter plate containing LB/chloramphenicol (25 μg/ml)/glycerol (7.5%) and stored at −80° C. after a single colony has been positively identified through sequencing. The clones can then be streaked out on a LB agar plate with the appropriate antibiotic, chloramphenicol (25 μg/ml)/sucrose (5%).

cDNA Clones—Novel Splice Variants for Neuregulin I

[0203] PCR-RACE products (neuregulin 1) were ligated into the pCRII-TOPO vector (Invitrogen). The cDNA clones are ACF-6_{—}30_{—}8848, OG-49-2, OG-A1R-75, ACF-68, ACF-69, ACF-6_{—}29_{—}8848, ACF-6_{—}28_{—}8847 and ACF-2_{—}11_{—}8847. The clones were picked into a 94 well microtiter plate containing LB/ampicillin (100 μg/ml)/glycerol (15%) and stored at −80° C. after a single colony has been positively identified through sequencing. The clones can then be streaked out on a LB agar plate with the appropriate antibiotic, ampicillin (100 μg/ml) or kanamycin (50 μg/ml).

### Example 2

Behavioral Testing of NRG1 and ErbB4 Mutant Mice

[0204] Male NRG1TM hypomorphs, ErbB4 hypomorphs and litter-mate controls for each line were bred at Charles River Laboratories USA by crossing to a C57B16 background. They were shipped to the testing laboratory at PsychoGenics Inc. NY, USA (six weeks prior to behavioral testing) where they were housed in groups of 3-5 related mice per cage. The open field study was conducted when the male mice were 5 to 6 months of age. Group housed mice were brought into the experimental room and allowed to acclimate for one hour prior to testing. Each mouse was placed for 30 minutes in a square open field box (17×17×12 inch). Up to eight animals were tested at one time, one animal in each of eight arenas, under low lighting conditions (provided by a 15 watt red lamp). The automated infrared beam array system measured locomotion in the center and periphery of the test arena. Activity data were collected in 5 min intervals over the 30 min open field session and analyzed with a series of repeated measures analysis of variance (ANOVA) with session interval as a within-subject factor and genotype as a between-subject factor. Clozapine (1 mg/kg in 1% Tween 20, pH 6.0) was injected intraperitoneally (i.p.) 25 min before behavioral testing. Total activity data from the study with clozapine were analyzed with a two-tailed, Student's t-test. Naïve mice were used for these experiments. It seemed that handling the mice or habituation to the testing conditions changed the level of hyperactivity or the sensitivity to clozapine on repeated test.

Binding Studies

[0205] [³H]-dizocilpine (MK-801) binding in NRG1 hypomorphic mice and control mice was studied as follows: Wild-type (n=18) and NRG1 mutant mice (n=16) forebrains were homogenized individually at 4□C in 25 volumes of Tris-HCl 50 mM, EDTA 10 mM, pH 7.1 buffer with a polytron (10,000 rpm, 30 sec). The homogenate was centrifuged at 48,000g for 10 min and the pellet was re-homogenized as above and incubated for 10 min at 37□C. After centrifugation the pellet was homogenized as above and the homogenate frozen at −80□C. [³H]-dizocilpine saturation isotherms were obtained by incubating various amounts of the radioligand (0.1 to 100 nM, final concentration) in the presence of 10 mg brain membranes for 2 hours at room temperature in a Tris-HCl 5 mM, glycine 100 μM, glutamate 100 μM, pH 7.4 binding buffer. The non-specific binding was measured in the presence of 100 μM of 1-[1-(2-Thienyl)cyclohexyl]piperidine (TCP). After incubation the membranes were filtered on GF/B glass fiber filters preincubated for 1 hour in a polyethylenimine 0.1% solution. The filters were washed three times with 3 ml of cold binding buffer and the radioactivity bound to the membranes was measured by liquid scintillation counting. The binding parameters K_{D} and Bₘₐₓ were obtained from the fit to the data of the equation of a rectangular hyperbola (one site model) by non-linear regression and were analysed by ANOVA.

NRG1 and ErbB4 Mutant Mice Display Behavioral Abnormalities that Overlap with Those Observed in Pharmacologically Induced Animal Models of Schizophrenia

[0206] NRG1 homozygous mice with disrupted EGF domain common to all NRG1 isoforms die embryonically. Heterozygous NRG1 null mice are viable, perform normally in tests of motor function, but show increased open field locomotor activity. An increase in open field locomotor activity is seen in neurodevelopmental models of schizophrenia as well as in several transgenic or knockout mice thought to model aspects of the schizophrenic phenotype.

[0207] NRG1 plays a critical role in the central nervous system (CNS) and its major receptors in CNS neurons are ErbB3 and ErbB4. Mice hypomorphic for either NRG1, ErbB2, ErbB3, or ErbB4 have been generated by others. Increased open field activity has been reported for NRG1 hypomorphic mice carrying a null allele, while the ErbB2 and ErbB3 mutant mice have been reported to be behaviorally normal (R. Gerlai, P. Pisacane, S. Erickson, Behav. Brain Res. 109, 219 (2000)). Behavioral tests on ErbB4 mice have not been reported.

[0208] We obtained one line of NRG1 hypomorphic mice (NRG1TM) in which the NRG1 exon encoding the transmembrane domain (TM) is disrupted in the heterozygotes. We also obtained for behavioral testing a line of ErbB4 hypomorphs heterozygous for a null allele of the gene (M. Gassmann et al., Nature 378, 390 (1995)). Both lines of mice developed normally, bred well, and showed grossly normal behavior. In the “novel open field-test” performed under dim red light, both the NRG1TM hypomorphs and the ErbB4 hypomorphic mice were significantly more active than the wild type mice (FIGS. 7A and 7B) but did not differ in measures of anxiety such as time in the center of the arena.

[0209] Ten NRG1TM mice and ten wild-type mice were injected i.p. with either clozapine (1 mg/kg) or vehicle 25 min prior to testing. Clozapine at the dose chosen reversed the increased activity of NGR1TM mice while it had no effect on the activity of litter-mate control mice (FIG. 8). The hyperactivity in the NRG1TM mice was, therefore, ameliorated with clozapine, which is in keeping with what has been observed in models for schizophrenia (Mohn, et al., Cell 98, 427 (1999), Glickstein, et al., Pharmacol. Ther. 91, 63 (2001)).

[0210] We performed MK-801 (NMDA antagonist) binding studies of forebrain homogenates from NRG1 hypomorphs created by Gerlai et al. (R. Gerlai, P. Pisacane, S. Erickson, Behav. Brain Res. 109, 219 (2000)) and control mice. The pKD values were analysed by ANOVA and did not reveal any differences between the wild type and the mutant mice. Bmax values (pmoles/mg protein) were found to be significantly different (P=0.0068 (one sided)) in the mutant than in the wild type mice suggesting that there are 16% fewer functional NMDA receptors in the mutant animals overall (Table 5).

[0211] It is also of interest here that there appears to be reduction in the numbers of functional NMDA receptors in certain regions of brains from schizophrenics. This is in keeping with reports suggesting a role for NRG1 in regulation of NMDA subunit expression (G. D. Fischbach, K. M. Rosen, Annu. Rev. Neurosci. 20, 429 (1997)).

TABLE 5
[³H] MK801 binding.
Concentrations of [³H] MK801 in homogenate from forebrains
of NRG1 knockout and wild type (WT) mice. Data are given in
(pmoles/mg protein), mean ± SD (one sided P value is given).

Bₘₐₓ values
(pmoles/mg protein)

| Mouse | Count | Average | SD | P value |
|---|---|---|---|---|
| NRG1 | 16 | 1.23 × 10⁻¹² | 2.22 × 10⁻¹³ | 6.8 × 10⁻³ |
| WT | 18 | 1.43 × 10⁻¹² | 2.14 × 10⁻¹³ | |

### Example 3

ErbB4 As a Target

[0212] Neuregulin (NRG) signals through a receptor tyrosine kinase family known as the ErbB receptors. The four different receptors (ErbB1-4) that belong to this family all have high protein sequence homology. The NRG1 gene binds to either ErbB3 or ErbB4 leading to homo- (ErbB3/3, ErbB4/4) or heterodimer (ErbB2/3, ErbB2/4) formation. Since ErbB3 has a defective kinase domain, only the ErbB2/3 heterodimer mediates signalling. Dimerization of ErbB4 caused by ligand binding leads to tyrosine phosphorylation of the receptor by its partner on four sites. Of these three sites, Y1056, Y1188 and Y1242 have been identified as docking sites for the SH2 domain containing proteins Shc (Y1188 and Y1242) and P13 kinase (Y1056). Recruitment of these proteins leads to propagation of the NRG1 signal trough their respective signalling pathways followed by biological response.

[0213] NRG acts as a trophic factor for neurons and glia and regulates the expression of genes important for neuronal biology such as nerurotransmitter receptors and voltage-gated ion channels. Both NRG1 and the ErbB receptors are widely expressed during development and in the adult. ErbB3 and ErbB4 are the major ErbB receptors in brain although low levels of ErbB2 expression is found in glia. Of these the ErbB4 is the receptor that is most restricted to neurons. It is most abundant in the cerebral cortex, slightly lower in the midbrain, and lowest in the cerebellum and brainstem. There is a good spatial correlation between expression of NRG1 and ErbB4 in the central nervous system and more importantly, the pattern of ErbB4 expression correlates well with the neuronal circuitry that has been implicated in schizophrenia. For example, in the cortex, ErbB4 is expressed by GABAergic interneurons, a subset of these appear to be primarily affected in schizophrenia.

[0214] It appears that schizophrenia is caused by a defect in NRG1/ErbB4 signalling that leads to decrease in the GABAergic interneurons; therefore, to treat schizophrenia (e.g., to correct the defect), an agent that potentiates the ErbB4 kinase activity can be used.

High Throughput Screening (HTS) for Agents that Activate ErbB4

[0215] The ErbB4 gene encodes for a transmembrane protein of 1308 amino acids (see, e.g., GenBank Accession number L07868, the entire teachings of which are incorporated herein by reference). The extracellular domain contains the ligand binding site. The protein has a single transmembrane domain that anchors it to the plasma membrane. The intracellular domain (amino acids 676-1308) contains the tyrosine kinase (amino acids 713-988) and the three tyrosine phosphorylation sites necessary for signalling (Y1056, Y1188 and Y1242). Assay standard deviation is 10%. An active compound considered for screening is below 70%.

In Vitro Based Protein Assay

[0216] The following general strategy is employed: recombinant proteins containing the ErbB4 kinase domain are expressed; HTS assay based on the kinase activity is developed; and compound libraries are screened for agents that potentiate ErbB4 activity.

Constructs

[0217] Several constructs were made encompassing the intracellular domain of ErbB4, these are: #1 amino acids 713-988, #2 amino acids 676-1308, #3 amino acids 676-1030, #4 amino acids 676-1119, #5 amino acids 676-1213 and #6 amino acids 676-1308 that contains mutation at position 863 (Aspartic acid to Aspargine) creating kinase-defective mutant of ErbB4. Numbering is relative to GenBank Accession number L07868. Clones were made by PCR amplification from plasmids containing the full length ErbB4 receptor. All clones contain the small antibody epitope AU1 on the N-terminus for detection of the protein and six Histidines at either end for purification. PCR products were cloned into the entry vector from the Gateway cloning system (Life Technology) and sequenced. Following validation of the sequence, the inserts were transferred into the pFastBac vector using the Gateway system for generation of Baculovirus.

Methodology

[0218] All constructs were made by PCR, using full length human ErbB4 (gift of Kermit Carraway) as template. Each of the \acute{5}primers contained the required sequence for homologous recombination in the Gateway system (underlined), Kozak sequence (undercase), ATG, the six codons of the AU1 epitope (bold) and 18 bases started from the indicated amino acid (example of primer: \acute{5} GGGG ACA AGT TTG TAC AAA AAA GCA GGC Tcc acc ATG GAC ACC TAT CGC TAT ATA XXX XXX XXX XXX XXX XXX \acute{3}, X represents the gene specific part of the primer; SEQ ID NO:1675). The 3primer included 18 gene specific bases upstream of the indicated amino acid for the construct and the sequence for the homologous recombination (\acute{5} GGG GAC CAC TTT GTA CAA GAA AGC TGG GT \acute{3}; SEQ ID NO: 1676) in addition to codons for six histidines. One hundred microliter reaction was performed using Pfu turbo polymerase (Stratagene, according to manufacturer recommendation). PCR fragments were cloned into the Entry Vector, using the BP reaction according to the manufacturer protocol (Invitrogen). The plasmid was then transfected into DH5a cells and vector DNA isolated from bacteria colonies, followed by sequencing to verify the construct. Once an error free construct was obtained the insert was transferred into the pFastBac (pDEST-10) vector (Invitrogene, see manufactures protocol). Plasmid was transformed into DH10Bac cells containing a baculovirus shuttle vector. Following site-specific transposition, high-molecular weight DNA was isolated and transfected into Sf9 cells using Bacfectin (Gibco/BRL, see manufactures protocol) and BacPac-Grace media (Clontech). Following three days incubation media was harvested, containing virus. The virus was then used for second round of infection, following three days incubation before harvesting. Two more rounds were done before high titre virus was obtained. For big scale purification of recombinant protein 200 ul-1 ml of the high titre virus was use to infect 500 mls of Sf9 cells at the density of 1*10⁶ cells/ml.

Expression and Purification of Recombinant Protein

[0219] Recombinant protein was expressed in Sf9 cells. Insect cells were infected with high titer virus stock. Following 72 hour infection, the recombinant protein was purified (see method). The quality of the purified protein and estimation of protein concentration was done by gel electrophoresis followed by silver staining of the gel (known amount of BSA was used as a standard), western blotting and Bradford assay.

[0220] Cells were harvested and washed 2× in icecold PBS pH 7. The cell pellet was resuspended in lysis buffer (20 mm Tris pH 8, 150 mM NaCl (molecular biology grade, CALBIOCHEM), 5 mM b-mercaptaethanol, 2 mm MgCl, 25% glycerol (ultra pure, USB), 2% N-Octyl-b-d-Glycopyrannoside (Molecular biology grade, CALBIOCHEM) and protease inhibitors set III (CALBIOCHEM)) using approximately 10 ml/1 g cells, and incubated for 1 hour on ice.

[0221] Lysate was centrifuged for 10 minutes at 200 g followed by centrifugation at 3500 g for 30 minutes. NaCl and Immidiazole (ultragrade, CALBIOCHEM) pH8 were added to the supernatant to a final concentration of 300 mM and 5 mM respectively.

[0222] Ni-NTA (Qiagen) was washed with 10 mM Tris pH8, and added to the lysate (approximately 1 ml/200 ml lysate). Binding was performed for 2 hours at 4 C with low speed stirring (magnetic stirring, 100 rpm). Subsequently the Ni-NTA was palleted by certification and transferred to an FPLC column. The column was washed with lysis buffer containing 300 mM NaCl and 5 mM Immidiazole, pH 8 followed by 2 washing steps using 20 mM Tris pH 8, 300 mM NaCl, 20% glycerol 2 mM b-mercaptaethanol, 1% NOG, 25 mM Immidiazole, and 20 mM Tris pH 8, 1 M NaCl, 10% glycerol, 2 mM b-mercaptoethanol, 0.2% NOG, Immidiazole 40 mM respectively. 10× the volume of the column was used for each wash step. After 30 minutes incubation in elution buffer, His tagged protein was eluted in 40 mM Tris pH 8, 150 mM NaCl, 25% glycerol, 4 mM b-mercaptaethanol, 2 mM MgCl, 0.1% NOG, 150 mM Immidiazole using 15× column volume.

[0223] The enzyme was divided up and stored at −80 C.

Evaluation of Kinase Activity

[0224] Fluoresence polarization (FP) was used to assay for kinase activity. FP is based on change in the polarization of polarized light that is shined through solution containing phosphopeptide (tracer) that is covalently linked to a flurophore and phosphoantibody. If another source of phosphorylated molecule is in the solution (such as phosporylated substrate), there will be displacement of the antibody from the tracer over to the substrate and the FP value will change, indicating that the kinase that phosporylated the substrate has activity.

[0225] Construct 676-1308 has been extensively analysed using this assay. The construct contains the full intracellular domain, harbouring both the kinase domain and the C-terminus that includes the autophosphoylation sites. Therefore when this construct is used no additional substrate is added and the activity of the kinase domain is evaluated based on the autophosporylation of the C-terminal tyrosines.

[0226] TKXtra™-Tyrosine Kinase Exploration Kit from LjL BioSystems was use for evaluation of the kinase activity. According to the method, purified enzyme is diluted in 20 mM Hepes, 0.05% NOG, 2 mM b-mercaptaethanol, 100 ug/ml BSA, 15 mm MgCl, 4 mM. The kinase reaction is started by addition of ATP, to a final concentration of 250 uM (20 ul reaction volume). After 1 hour incubation the reaction is stopped by addition of 1 ul of 20 mM EDTA. The Fluorescence polarization assay is performed as described in the protocol provided by the manufactures. Briefly, antibody diluted in assay buffer is added followed by addition of tracer diluted in assay buffer. The end volume of the reaction is 40 ul. After 30 minutes incubation at room temperature in the dark the fluorescence polarization is measured using a LJL Analyst.

[0227] Repeated assays using different batches of enzyme has established the IC50 value for this construct at 0.5-4 nM. Western blotting was performed using antibody that recognizes phosphorylated tyrosine to confirm the FP assay and to establish that the change in the FP value is due to autophosphorylation on tyrosines in the C-terminus of the protein. Since there are several phosphorylation sites in the C-terminus, it is important to know how many of them and which ones are used. To evaluate this, kinase assay was performed and the phosphorylation status evaluated by trypsin digest and mass spectrometry analysis (MALDI-TOF). The results indicated that two tyrosines (1242 a major side and 1284 minor side) are phosphorylated in the C-terminus.

HTS Assay

[0228] The low throughput assay was then scaled up to HTS level, by adapting the assay to 384 well format, integrating high throughput robots for pipeting, and establishing database and other software tools to evaluate the data.

[0229] Screening has now been started using the 676-1308 protein. The first compounds of the one hundred thousand that will be screened have been tested using enzyme final concentration at 1 mM.

[0230] Purified enzyme is diluted in 20 mM Hepes, 0.05% NOG, 2 mM b-mercaptaethanol, 100 ug/ml BSA, 15 mm MgCl, 4 mM MnCl and incubated for 30 minutes at room temperature with 10 or 30 uM compound. Compounds are dissolved in 100% DMSO. The kinase reaction is started by addition of ATP, to a final concentration of 250 uM. The reaction volume is 20 ul, and the DMSO concentration in the assay at 10%. After 1 hour incubation the reaction is stopped by addition of 20 mM EDTA. The fluorescence polarization assay is performed as before.

[0231] The standard deviation (SD) in the assay is around 10%. Compounds considered to be active will fall 3SD away from the mean signal for the enzyme concentration that is used. Every compound that falls into that category will be further tested, see below.

Specificity of the Identified Hits

[0232] Once a compound has been identified as a potential activator of the ErbB4 kinase, its specificity towards ErbB4 will be tested using the same in vitro kinase assay and recombinant ErbB2 protein (made by us as described for ErbB4), ErbB1 and the insulin receptor (Biomol) as targets. In addition, the ability of the compounds to activate ErbB4 and other kinases in vivo will be tested. Plamid expressing the ErbB4, ErbB2 and the insulin receptor will be transfecting into NIH3T3 cells, followed by selection of cells that harbor the DNA by selecting for neomycin resistant. Individual clones will be grown out and evaluated for expression of the receptors by western bloting. Cell lines expressing the receptors will then be treated with the compound and evaluated for activity by protein kinase assays or by western blotting using antibodies that recognize the phosphorylated form of ErbB4 or its downstream signalling components (i.e., MAP kinase, New England Biolabs).

[0233] Compounds that meet these characteristics will then be further developed, with the goal of finding highly active compounds that specifically activate ErbB4, cross the blood brain barrier, are non-toxic, and have the appropriate half-life. These candidate compounds will then be tested on available schizophrenia animal models.

Discussion

Evidence to Support Role of NRG1 as Candidate Gene for Association with the Pathogenesis of Schizophrenia.

[0234] Through the work described above we have identified the NRG1 gene as a strong candidate for a gene playing a role in the pathogenesis of schizophrenia. We present three lines of evidence in support of this role for NRG1.

[0235] The first is genetic evidence consisting of suggestive linkage of schizophrenia to chromosome 8p in Icelandic families. This is supported by coincidence with suggestive linkage in four other populations (A. E. Pulver et al., Am. J. Med Genet. 60, 252 (1995); H. W. Moises et al., Nature. Genet. 11, 321 (1995); K. S. Kendler et al., Am. J. Psychiatry 153, 1534 (1996); D. F. Levinson et al., Am. J. Med. Genet. 67, 580 (1996); R. E. Straub, C. J. MacLean, D. Walsh, K. S. Kendler, Cold Spring Harb. Symp. Quant. Biol. 61, 823 (1996); J. L Blouin et al., Nature Genet. 20, 70 (1998); S. H. Shaw et al., Am. J. Med. Genet. 81, 364 (1998); C. A. Kaufmann et al., Am. J. Med. Genet. 81, 282 (1998); I. Hovatta et al., Mol. Psychiatry 3, 452 (1998); L. M. Brzustowicz et al., Am. J. Hum. Genet. 65, 1096 (1999); and H. M. Gurling et al., Am. J. Hum. Genet. 68, 661 (2001)). This is further supported by highly significant association of overlapping haplotypes, that contain only one gene within the overlap, namely NRG1. The population attributed risk for the identified core haplotype is 16%, which is a substantial contribution to the public health burden. The weakness in the genetic evidence is that we have not yet found a clear pathogenic mutation, which may, however, be a par for the course in the genetics of common diseases.

[0236] The second line of evidence is that mice hypomorphic for each of two mutations in NRG1 and one mutation in a receptor for NRG1 display behavior that overlaps with mouse models for schizophrenia and this is reversed with clozapine in a NRG1 mutant line.

[0237] The third line of evidence is that the number of NMDA receptors in the NRG1 hypomorphs is reduced which is in keeping with observations made on brains from schizophrenia patients. Thus these results argue that variants of the NRG1 gene contribute to the pathogenesis of schizophrenia in some patients, probably through a decrease in NRG1 signaling. The overlap in behavioral phenotype between the NRG1 and ErbB4 hypomorphic mice, and the lack of a similar behavioral phenotype in ErbB2 or ErbB3 mice (R. Gerlai, P. Pisacane, S. Erickson, Behav. Brain Res. 109, 219 (2000)), argues that the defect is primarily neuronal. Although each line of evidence is not conclusive, when put together they constitute a strong case for NRG1 as a culprit in the pathogenesis of schizophrenia. Furthermore we have discovered in the NRG1 hypomorphs an excellent animal model for schizophrenia that is based on understanding of the genetics of the disease.

[0238] Our behavioral data on the NRG1 and ErbB4 mouse mutants provide additional evidence for a role of NRG1 in schizophrenia. We replicate the work done by Gerlai et al. (R. Gerlai, P. Pisacane, S. Erickson, Behav. Brain Res. 109, 219 (2000)) on a different NRG1 mutant and we show that both the NRG1TM and the ErbB4 hypomorph mice are hyperactive, a phenotype that overlaps with behaviors induced by PCP in normal mice. Clozapine reduced the hyperactivity in the NRG1 mice as it does in PCP treated mice and mice with reduced number of NR2A receptor subunits (A. R. Mohn, R. R. Gainetdinov, M. G. Caron, B. H. Koller, Cell 98, 427 (1999)). The clozapine reversal, therefore, further supports that the hyperactivity observed in the NRG1 mice is related to schizophrenic phenotypes.

TABLE 1

```
LOCUS NRG1 1503841 bp DNA
DEFINITION Human neuregulin 1 gene (NRG1), complete cds, complete sequence.
ACCESSION _________
VERSION _________
KEYWORDS .
SOURCE human.
ORGANISM Homo sapiens
                          Eukaryota; Metazoa; Chordata; Craniata; Vertebrata; Euteleostomi;
                          Mammalia; Eutheria; Primates; Catarrhini; Hominidae; Homo.
REFERENCE 1 (bases 1 to 1503841)
    AUTHORS _________
    TITLE Direct Submission
    JOURNAL Submitted (13-FEB-2001) deCODE genetics, Inc., Lynghals 1,
                          Reykjavik 110, Iceland
COMMENT This sequence has been assembled partly from BAC sequences
                          available from GenBank (AC012139.3, AC068672.2, AC083759.2,
                          AC004040.1, AC027024.3, AC022833.2, AC021909.5, AC022850.3,
                          AC023948.2, AC068359.2, AC083977.2, AF181895.2, AF128834.2,
                          AF182108.2), and partly from BAC sequences generated in-house
                          (RP11-29H12, RP11-450K14, RP11-478B14, RP11-420M9, RRP11-22F19,
                          RP11-72H22, RP11-244L21, RP11-225C17, RP11-317J8)
FEATURES Location/Qualifiers source
                                            1..1503841
                                            /organism=“Homo sapiens”
                                            /db_xref=“taxon : 9606”
                                            /chromosome=“8”
                                            /map=“8p12”
                                            /clones=“BACs RP11-10L15, RP11-566H8, CTD-386L14, 187F3
                                            (LBNL H111), RP11-583F20, RP11-147C21, RRP11-22F19,
                                            RP11-275E10, RP11-669B22, RP11-468C1, RP11-317J8,
                                            CTD-2329M5, GS1-57G24, RP11-11N9, RP11-29H12, RP11-450K14,
                                            RP11-478B14, RP11-420M9, RP11-72H22, RP11-244L21,
                                            RP11-225C17.”
                                            /note=“There are 2 gaps of unknown size in this sequence,
                                            as follows: 39177..39276, 1421616..1421715.”
          gene 244312..1369465
                                            /gene=“NRG1”
                                            /note=“neuregulin 1”
          exon 244205..244348
                                            /gene=“NRG1”
                                            /number=1
          CDS
join (244312..244348, 1200888..1201065, 1210623..1210744,
1332978..1333107, 1347707..1347765, 1359432..>1359481)
                                            /gene=“NRG1”
                                            /codon_start=1
                                            /product=“pACF-6_30” (clone ACF-6_30)
/translation=“MGKGRAGRVGTTALPPRLKEMKSQESAAGSKLVLRCETSSEYSS
LRFKWFKNGNELNRKNKPQNIKIQKKPGKSELRINKASLADSGEYMCKVISKLGNDSA
SANITIVESNATSTSTTGTSHLVKCAEKEKTFCVNGGECFMVKDLSNPSRYLCKCPNE
                                            FTGDRCQNYVMASFYKAEELYQKRVLTITGIC”
          exon 244641..245646
                                            /gene=“NRG1”
                                            /number=2
          CDS
join (244902..245646, 1200888..1201065, 1210623..1210744,
                                            1332978..1333107, 1347707..1347800)
                                            /gene=“NRG1”
                                            /codon_start=1
                                            /product=“neuregulin; glial growth factor 2”
                                            /protein_id=“AAB59622.1”
                                            /db_xref=“GI:292048”
/translation=“MRWRRAPRRSGRPGPRAQRPGSAARSSPPLPLLPLLLLLGTAAL
APGAAAGNEAAPAGASVCYSSPPSVGSVQELAQRAAVVIEGKVHPQRRQQGALDRKAA
AAAGEAGAWGGDREPPAAGPRALGPPAEEPLLAANGTVPSWPTAPVPSAGEPGEEAPY
LVKVHQVWAVKAGGLKKDSLLTVRLGTWGHPAFPSCGRLKEDSRYIFFMEPDANSTSR
APAAFRASFPPLETGRNLKKEVSRVLCKRCALPPRLKEMKSQESAAGSKLVLRCETSS
EYSSLRFKWFKNGNELNRKNKPQNIKIQKKPGKSELRINKASLADSGEYMCKVISKLG
NDSASANITIVESNATSTSTTGTSHLVKCAEKEKTFCVNGGECFMVKDLSNPSRYLCK
                                            CPNEFTGDRCQNYVMASFYSTSTPFLSLPE”
                                            /note=“This sequence of neuregulin/glial growth factor 2
                                            differs from the one in Genbank (GI:292048) at residue 253
                                            (R instead of Q).”
          CDS
join (<245598..245646, 1200888..1201065, 1210623..1210744,
1332978..1333107, 1347707..1347765, 1354621..1354644,
                                            1359432..>1359481)
                                            /gene=“NRG1”
                                            /codon_start=1
                                            /product=“pOG-140-80” (clone OG-140-80)
/translation=“GRNLKKEVSRVLCKRCALPPRLKEMKSQESAAGSKLVLRCETSS
EYSSLRFKWFKNGNELNRKNKPQNIKIQKKPGKSELRINKASLADSGEYMCKVISKLG
NDSASANITIVESNATSTSTTGTSHLVKCAEKEKTFCVNGGECFMVKDLSNPSRYLCK
                                            CPNEFTGDRCQNYVMASFYKHLGIEFMEAEELYQKRVLTITGIC”
          CDS
join (<245598..245646, 1200888..1201065, 1210623..1210744,
                                            1219543..1219593, 1332978..>1333066)
                                            /gene=“NRG1”
                                            /codon_start=1
                                            /product=“pSB-9_26” (clone SB-9_26)
/translation=“GRNLKKEVSRVLCKRCALPPRLKEMKSQESAAGSKLVLRCETSS
EYSSLRFKWFKNGNELNRKNKPQNIKIQKKPGKSELRINKASLADSGEYMCKVISKLG
NOSASANITIVESNETITGMPASTEGAYVSSATSTSTTGTSHLVKCAEKEKTFCVNGG
                                            ECF”
          gene 629728..744437
                                            /gene=“Neuregulin 1 Associated Gene 1”
          exon 629728..629804
                                            /gene=“Neuregulin 1 Associated Gene 1”
                                            /number=1
          exon 630975..631187
                                            /gene=“Neuregulin 1 Associated Gene 1”
                                            /number=2
          CDS join (<630975..631187, 634335..>634376)
                                            /gene=“Neurequlin 1 Associated Gene 1”
                                            /codon_start=1
                                            /product=“pACF-14F-64” (clone ACF-14F-64)
/translation=“FYQLGLHLLSLEHIQSFFLFFFLRRSLALSPRLECSGRISTHCK
                                            LRLPDSRHSPASDPGVAGTTGACAISMNRAAIRTKTVLRSS”
          exon 631283..631320
                                            /gene=“Neuregulin 1 Associated Gene 1”
                                            /number=3
          exon 634335..634441
                                            /gene=“Neuregulin 1 Associated Gene 1”
                                            /number=4A
          exon 634335..634892
                                            /gene=“Neuregulin 1 Associated Gene 1”
                                            /number=4B
          CDS
join (>634386..634441, 635332..635415, 744176..744179)
                                            /gene=“Neuregulin 1 Associated Gene 1”
                                            /codon_start=1
                                            /product=“pIMAGE:727960” (clone =“IMAGE:727960”; 3′ end
                                            sequence in Genbank, Accession AA435550, 5′ end sequence
                                            in Genbank, Accession AA394309)
/translation=“MWCEMFYGQKMEMRCRNWRLRINLKTKSRFWPDTDAKVTPMLSL
                                            LLR”
          CDS (634386..634445)
                                            /gene=“Neuregulin 1 Associated Gene 1”
                                            /codon_start=1
                                            /product=“pACF-E77B” (clone ACF-E77B)
                                            /translation=“MWCEMFYGQKMEMRCRNWR”
          CDS join(<634404..634441, 635332..635491)
                                            /gene=“Neuregulin 1 Associated Gene 1”
                                            /codon_start=1
                                            /product=“pIMAGE:1643938” (clone =
                                            “IMAGE:1643938”; 3′ end
                                            sequence in Genbank, Accession AI027638)
/translation=“YGQKMEMRCRNWRLRTNLKTKSRFWPDTDAKVTPMLSLLLRYKL
                                            PYFKQLFHLFNSIPFLSLFHM”
          exon 635332..635415
                                            /gene=“Neuregulin 1 Associated Gene 1”
                                            /number=5A
          exon 635332..635509
                                            /gene=“Neuregulin 1 Associated Gene 1”
                                            /number=5B
          exon 744176..744437
                                            /gene=“Neuregulin 1 Associated Gene 1”
                                            /number=6
          exon 826010..826101
                                            /gene=“NRG1”
                                            /number=3
          CDS
join (826053..826101, 1200888..1201065, 1210623..1210744,
                                            1332978..>1333051)
                                            /gene=“NRG1”
                                            /codon_start=1
                                            /product=“pSB-9A-a_04” (clone SB-9A-a_04)
/translation=“MKKRNEMIFLATLKNKALPPRLKEMKSQESAAGSKLVLRCETSS
EYSSLRFKWFKNGNELNRKNKPQNTKIQKKPGKSELRINKASLADSGEYMCKVISKLG
                                            NDSASANITIVESNATSTSTTGTSHLVKCAEKEKTFCVN”
          CDS
join (826053..826101, 1200888..1201065, 1210623..1210744,
1219543..1219593, 1221864..1221914, 1332978..>1333105)
                                            /gene=“NRG1”
                                            /codon_start=1
                                            /product=“pOG-6 17”(clone OG-6_17)
/translation=“MKKRNEMIFLATLKNKALPPRLKEMKSQESAAGSKLVLRCETSS
EYSSLRFKWFKNGNELNRKNKPQNIKIQKKPGKSELRINKASLADSGEYMCKVISKLG
NDSASANITIVESNEIITGMPASTEGAYVSSESPIRISVSTEGANTSSSTSTSTTGTS
                                            HLVKCAEKEKTFCVNGGECFMVKDLSNPSRYLC”
          CDS
join (826053..826101, 1200888..1201065, 1210623..1210744,
1219543..1219593, 1332978..>1333015)
                                            gene=“NRG1”
                                            /codon_start=1
                                            /product=“pSB-20_90” (clone SB-20_90)
/translation=“MKKRNEMIFLATLKNKALPPRLKEMKSQESAAGSKLVLRCETSS
EYSSLRFKWFKNGNELNRKNKPQNIKIQKKPGKSELRINKASLADSGEYMCKVISKLG
                                            NDSASANITIVESNEIITGMPASTEGAYVSSATSTSTTGTSHLV”
          exon 826308..826355
                                            /gene=“NRG1”
                                            /number=4
          exon 1034243..1034321
                                            /gene=“NRG1”
                                            /number=5
          exon 1153295..1153886
                                            /gene=“NRG1”
                                            /number=6
          CDS
join (1153787..1153886, 1200888..1201065, 1210623..1210744,
1219543..1219593, 1221864..1221914, 1332978..1333107,
1347707..1347765, 1354621..1354644, 1359432..1359534,
1361463..1361589, 1364363..1364493, 1365257..1365463,
1368811. .1369465)
                                            /gene=“NRG1”
                                            /codon_start=1
                                            /product=“Heregulin-beta1”
                                            /protein_id=“AAA58639.1”
                                            /db_xref=“GI:183995”
/translation=“MSERKEGRGKGKGKKKERGSGKKPESAAGSQSPALPPRLKEMKS
QESAAGSKLVLRCETSSEYSSLRFKWFKNGNELNRKNKPQNIKIQKKPGKSELRINKA
SLADSGEYMCKVISKLGNDSASANITIVESNEIITGMPASTEGAYVSSESPIRISVST
EGANTSSSTSTSTTGTSHLVKCAEKEKTFCVNGGECFMVKDLSNPSRYLCKCPNEFTG
DRCQNYVMASFYKHLGIEFMEAEELYQKRVLTITGICIALLVVGIMCVVAYCKTKKQR
KKLHDRLRQSLRSERNNTMNIANGPHHPNPPPENVQLVNQYVSKNVISSEHIVEREAE
TSFSTSHYTSTAHHSTTVTQTPSHSWSNGHTESILSESHSVIVMSSVENSRHSSPTGG
PRGRLNGTGGPRECNSFLRHARETPDSYRDSPHSERYVSANTTPARMSPVDFHTPSSP
KSPPSEMSPPVSSMTVSMPSMAVSPFMEEERPLLLVTPPRLREKKFDHHPQQFSSFHH
NPAHDSNSLPASPLRIVEDEEYETTQEYEPAQEPVKKLANSRRAKRTKPNGHIANRLE
VDSNTSSQSSNSESETEDERVGEDTPELGIQNPLAASLEATPAFRLADSRTNPAGRFS
                                            TQEEIQARLSSVIANQDPIAV”
                                            /note=“This sequence of heregulin-beta1 differs from the
                                            one in Genbank (GI:183995) at residues 38 (R instead of Q)
                                            and 294 (T instead of M).”
          CDS
join (1153787..1153886, 1200888..1201065, 1210623..1210744,
1219543..1219593, 1221864..1221914, 1332978..1333107,
1347707..1347765, 1359432..1359534, 1361463..1361589,
1364363..1364493, 1365257..1365463, 1368811..1369465)
                                            /gene=“NRG1”
                                            /codon_start=1
                                            /product=“Heregulin-beta2”
                                            /protein_id=“AAA58640.1”
                                            /db_xref=“GI:183997”
/translation=“MSERKEGRGKGKGKKKERGSGKKPESAAGSQSPALPPRLKEMKS
QESAAGSKLVLRCETSSEYSSLRFKWFKNGNELNRKNKPQNIKTQKKPGKSELRINKA
SLADSGEYMCKVISKLGNDSASANTTIVESNEIITGMPASTEGAYVSSESPIRISVST
EGANTSSSTSTSTTGTSHLVKGAEKEKTFCVNGGECFMVKDLSNPSRYLCKCPNEFTG
DRGQNYVMASFYKAEELYQKRVLTTTGICIALLVVGIMCVVAYCKTKKQRKKLHDRLR
QSLRSERNNTMNIANGPHHPNPPPENVQLVNQYVSKNVISSEHIVEREAETSFSTSHY
TSTAHHSTTVTQTPSHSWSNGHTESILSESHSVIVMSSVENSRHSSPTGGPRGRLNGT
GGPRECNSFLRHARETPDSYRDSPHSERYVSANTTPARMSPVDFHTPSSPKSPPSEMS
PPVSSMTVSMPSMAVSPFMEEERPLLLVTPPRLREKKFDHHPQQFSSFHHNPAHDSNS
LPASPLRIVEDEEYETTQEYEPAQEPVKKLANSRRAKRTKPNGHIANRLEVDSNTSSQ
SSNSESETEDERVGEDTPFLGIQNPLAASLEATPAFRLADSRTNPAGRFSTQEETQAR
                                            LSSVIANQDPIAV”
                                            /note=“This sequence of heregulin-beta2 differs from the
                                            one in Genbank (GI:183997) at residues 38 (R instead of Q)
                                            286 (T instead of M) and 460 (M instead of K).”
          CDS
join (1153787..1153886, 1200888..1201065, 1210623..1210744,
1219543..1219593, 1221864..1221914, 1332978..1333111)
                                            /gene=“NRG1”
                                            /codon_start=1
                                            /db_xref=“MIM:142445”
                                            /db_xref=“LocusID:3084”
                                            /product=“heregulin, alpha (45kD, ERBB2 p185-activator)”
                                            /protein_id=“NP_004486.1”
                                            /db_xref=“GI:4758526”
/translation=“MSERKEGRGKGKGKKKERGSGKKPESAAGSQSPALPPRLKEMKS
QESAAGSKLVLRCETSSEYSSLRFKWFKNGNELNRKNKPQNIKIQKKPGKSELRINKA
SLADSGEYMCKVTSKLGNDSASANITIVESNETITGMPASTEGAYVSSESPIRISVST
EGANTSSSTSTSTTGTSHLVKCAEKEKTFCVNGGECFMVKDLSNPSRYLCK”
                                            /note=“This sequence of heregulin, alpha (45kD, ERB2 p185-
                                            activator) differs from the one in Genbank (GI:4758526) at
                                            residue 38 (R instead of Q).”
          CDS
join (1153787..1153886, 1200888..1201065, 1210623..1210744,
1219543..1219593, 1221864..1221914, 1332978..1333107,
1347040..1347107, 1359432..1359534, 1361463..1361589,
1364363..1364493, 1365257..1365463, 1368811..1369465)
                                            /gene=“NRG1”
                                            /codon_start=1
                                            /product=“Heregulin-alpha”
                                            /protein_id=“AAA58638.1”
                                            /db_xref=“GI:183993”
/translation=“MSERKEGRGKGKGKKKERGSGKKPESAAGSQSPALPPRLKEMKS
QESAAGSKLVLRCETSSEYSSLRFKWFKNGNELNRKNKPQNIKIQKKPGKSELRINKA
SLADSGEYMCKVISKLGNDSASANITIVESNEIITGMPASTEGAYVSSESPIRISVST
EGANTSSSTSTSTTGTSHLVKCAEKEKTFCVNGGECFMVKDLSNPSRYLGKCQPGFTG
ARCTENVPMKVQNQEKAEELYQKRVLTITGICIALLVVGIMCVVAYCKTKKQRKKLHD
RLRQSLRSERNNTMNIANGPHHPNPPPENVQLVNQYVSKNVISSEHTVEREAETSFST
SHYTSTAHHSTTVTQTPSHSWSNGHTESILSESHSVIVMSSVENSRHSSPTGGPRGRL
NGTGGPREGNSFLRHARETPDSYRDSPHSERYVSAMTTPARMSPVDFHTPSSPKSPPS
EMSPPVSSMTVSMPSMAVSPFMEEERPLLLVTFPRLREKKFDHHPQQFSSFHHNPAHD
SNSLPASPLRIVEDEEYETTQEYEPAQEPVKKLANSRRAKRTKPNGHIANRLEVDSNT
SSQSSNSESETEDERVGEDTPFLGIQNPLAASLEATPAFRLADSRTNPAGRFSTQEEI
                                            QARLSSVIANQDPIAV”
                                            /note=“This sequence of heregulin-alpha differs from the
                                            Genbank one (GI:183993) at residue 289 CT instead of M).”
          CDS
join (1153787..1153886, 1200888..1201065, 1210623..1210744,
1219543..1219593, 1221864..1221914, 1332978..1333107,
1347040..1347107, 1359432..1359534, 1361463..1361589,
1364363..1364493, 1365257..1365463, 1368281..1368401)
                                            /gene=“NRG1”
                                            /codon_start=1
                                            /product=“Neu differentiation factor”
                                            /protein_id=“AAA19951.1”
                                            /db_xref=“GI:408403”
/translation=“MSERKEGRGKGKGKKKERGSGKKPESAAGSQSPALPPRLKEMKS
QESAAGSKLVLRCETSSEYSSLRFKWFKNGNELNRKNKPQNIKIQKKPGKSELRTNKA
SLADSGEYMCKVISKLGNDSASANITIVESNEIITGMPASTEGAYVSSESPIRISVST
EGANTSSSTSTSTTGTSHLVKCAEKEKTFCVNGGECFMVKDLSNPSRYLCKCQPGFTG
ARCTENVPMKVQNQEKAEELYQKRVLTITGICIALLVVGIMCVVAYCKTKKQRKKLHD
RLRQSLRSERNNTMNIANGPHHPNPPPENVQLVNQYVSKNVISSEHIVEREAETSFST
SHYTSTAHHSTTVTQTPSHSWSNGHTESILSESHSVIVMSSVENSRHSSPTGGPRGRL
NGTGGPRECNSFLRHARETPDSYRDSPHSERHNLIAELRRNKAHRSKCMQIQLSATHL
                                            RSSSIPHLGFIL_
                                            /note=“This sequence of neu differentiation factor differs
                                            from the Genbank one (GI:408403) at residue 289 (T instead of M).”
          CDS
join (1153787..1153886, 1200888..1201065, 1210623..1210744,
1219543..1219593, 1221864..1221914, 1332978..1333107,
                                            1347707..1347800)
                                            /gene=“NRG1”
                                            /codon_start=1
                                            /product=“Heregulin-beta3”
                                            /protein_id=“AAA58641.1”
                                            /db_xref=“GI:183999”
/translation=“MSERKEGRGKGKGKKKERGSGKKPESAAGSQSPALPPRLKEMKS
QESAAGSKLVLRCETSSEYSSLRFKWFKNGNELNRKNKPQNIKIQKKPGKSELRINKA
SLADSGEYMCKVTSKLGNDSASANITIVESNEIITGMPASTEGAYVSSESPIRISVST
EGANTSSSTSTSTTGTSHLVKCAEKEKTFCVNGGECPMVKDLSNPSRYLCKCPNEFTG
                                            DRCQNYVMASFYSTSTPFLSLPE”
                                            /note=“This sequence of heregulin-beta3 differs from the
                                            Genbank one (GI:183999) at residue 38 (R instead of Q).”
          CDS
join (<1153808..1153886, 1200888..1201065, 1210623..1210744,
                                            1332978..>1333066)
                                            /gene=“NRG1”
                                            /codon_start=1
                                            /product=“pSB-20_62” (clone SB-20_62)
/translation=“RGKGKGKKKERGSGKKPESAAGSQSPALPPRLKEMKSQESAAGS
KLVLRCETSSEYSSLRFKWFKNGNELNRKNKPQNIKIQKKPGKSELRINKASLADSGE
YMCKVISKLGNDSASANITIVESNATSTSTTGTSHLVKCAEKEKTFCVNGGECF”
          CDS
join (<1153814..1153886, 1200888..1201065, 1210623..1210744,
                                            1219543..1219593, 1332978..>1333066)
                                            /gene=“NRG1”
                                            /codon_start=1
                                            /product=“pSB-11_05” (clone SB-11_05)
/transiation=KGKGKKKERGSGKKPESAAGSQSPALPPRLKEMKSQESAAGSKL
VLRCETSSEYSSLRFKWFKNGNELNRKNKPQNIKIQKKPGKSELRINKASLADSGEYM
CKVTSKLGNDSASANITIVESNEIITGMPASTEGAYVSSATSTSTTGTSHLVKCAEKE
                                            KTFCVNGGECF”
          exon 1200722..1201065
                                            /gene=“NRG1”
                                            /number=7a
          CDS
join (1200824..1201065, 1210623..1210744, 1219543..1219593,
                                            1221864..1221914, 1332978..>1333105)
                                            /gene=“NRG1”
                                            /codon_start=1
                                            /product=“pAGF-68_45” (clone ACF-68_45)
/translation=“MFLFERLPGDQSCFSFSFLLLALPPRLKEMKSQESAAGSKLVLR
CETSSEYSSLRFKWFKNGNELNRKNKPQNIKIQKKPGKSELRINKASLADSGEYMCKV
ISKLGNDSASANITIVESNEIITGMPASTEGAYVSSESPIRISVSTEGANTSSSTSTS
                                            TTGTSHLVKCAEKEKTFCVNGGECFMVKDLSNPSRYLC”
          CDS
join (1200824..1201065, 1210623..1210744, 1332978..>1333105)
                                            /gene=“NRG1”
                                            /codon_start=1
                                            /product=“pACF-69_52” (clone ACF-69_52)
/translation=“MFLFERLPGDQSCFSFSFLLLALPPRLKEMKSQESAAGSKLVLR
CETSSEYSSLRFKWFKNGNELNRKNKPQNIKIQKKPGKSELRINKASLADSGEYMCKV
ISKLGNDSASANTTIVESNATSTSTTGTSHLVKCAEKEKTFCVNGGECFMVKDLSNPS
                                            RYLC”
          exon 1200888..1201065
                                            /gene=“NRG1”
                                            /number=7b
          CDS
join (1200911..1201065, 1210623..1210744, 1332978..>1333066)
                                            /gene=“NRG1”
                                            /codon_start=1
                                            /product=“pACF-3R_19” (clone ACF-3R_19) or “pSB-9B-b_28”
                                            (clone SB-9B-b_28)
                                            /note=“Clone SB-9B-b_28 differs from clone ACF-3R 19 in
                                            exon content at the 5′ end, but encodes a protein fragment
                                            identical to clone ACF-3R_19.”
/translation=“MKSQESAAGSKLVLRCETSSEYSSLRFKWFKNGNELNRKNKPQN
IKIQKKPGKSELRINKASLADSGEYMCKVISKLGNDSASANITIVESNATSTSTTGTS
                                            HLVKCAEKEKTFCVNGGECF”
          CDS
join (<1200935..1201065, 1210623..1210744, 1219543..1219593,
                                            1332978..1333107, 1347707..1347800)
                                            /gene=“NRG1”
                                            /codon_start=1
                                            /product=“pACF-2R_09” (clone ACF-2R_09)
/translation=“GSKLVLRCETSSEYSSLRFKWFKNGNELNRKNKPQNIKIQKKPG
KSELRINKASLADSGEYMCKVISKLGNDSASANITIVESNEIITGMPASTEGAYVSSA
TSTSTTGTSHLVKCAEKEKTFCVNGGECFMVKDLSNPSRYLCKCPNEFTGDRCQNYVM
                                            ASFYSTSTPFLSLPE”
          CDS
join (<1200935..1201065, 1210623..1210744, 1332978..1333111)
                                            /gene=“NRG1”
                                            /codon_start=1
                                            /product=“pSB-616” (clone SB-6_16)
/translation=“GSKLVLRCETSSEYSSLRFKWFKNGNELNRKNKPQNIKIQKKPG
KSELRINKASLADSGEYMCKVISKLGNDSASANITIVESNATSTSTTGTSHLVKCAEK
                                            EKTFCVNGGECFMVKDLSNPSRYLCK”
          CDS
join (<1200935..1201065, 1210623..1210744, 1219543..1219593,
1221864..1221914, 1332978..1333107, 1347707..1347800)
                                            /gene=“NRG1”
                                            /codon_start=1
                                            /product=“pACF-1_06” (clone ACF-1_06)
/translation=“GSKLVLRCETSSEYSSLRFKWFKNGNELNRKNKPQNIKIQKKPG
KSELRINKASLADSGEYMCKVISKLGNDSASANITIVESNEIITGMPASTEGAYVSSE
SPIRTSVSTEGANTSSSTSTSTTGTSHLVKCAEKEKTFCVNGGECFMVKDLSNPSRYL
                                            CKGPNEFTGDRCQNYVMASFYSTSTPFLSLPE”
          CDS
join (<1200938..1201065, 1210623..1210744, 1332978..1333107,
                                            1347707..1347800)
                                            /gene=“NRG1”
                                            /codon_start=1
                                            /product=“pACF-1_03” (clone ACF-1_03)
/translation=“SKLVLRCETSSEYSSLRFKWFKNGNELNRKNKPQNIKIQKKPGK
SELRINKASLADSGEYMCKVISKLGNDSASANTTIVESNATSTSTTGTSHLVKCAEKE
KTFCVNGGECFMVKDLSNPSRYLCKCPNEFTGDRCQNYVMASFYSTSTPFLSLPE”
          CDS
join(<1200953..1201065, 1210623..1210744, 1219543. .1219593,
1221864..1221914, 1332978..1333107, 1347707..1347765,
1354621..1354644, 1359432..1359534, 1361463..>1361571)
                                            /gene=“NRG1”
                                            /codon_start=1
                                            /product=“pACF-48R_22” (clone ACF-48R_22)
/translation=“RCETSSEYSSLRFKWFKNGNELNRKNKPQNIKIQKKPGKSELRI
NKASLADSGEYMCKVISKLGNDSASANITIVESNEIITGMPASTEGAYVSSESPIRIS
VSTEGANTSSSTSTSTTGTSHLVKCAEKEKTFCVNGGECFMVKDLSNPSRYLCKCPNE
FTGDRCQNYVMASFYKHLGIEFMEAEELYQKRVLTITGICIALLVVGIMCVVAYCKTK
                                            KQRKKLHDRLRQSLRSERNNTMNIANGPHHPNPPPE”
          exon 1210623..1210744
                                            /gene=“NRG1”
                                            /number=8
          CDS
join (<1210624..1210744, 1219543..1219593, 1221864..1221914,
1332978..1333107, 1347707..1347765, 1354621..1354644,
1359432..1359534, 1361463..1361589, 1364363..1364493,
                                            1365257..1365463, 1368811..1369465)
                                            /gene=“NRG1”
                                            /codon_start=1
                                            /product=“Neu differentiation factor (partial)”
                                            /protein_id=“AAA19953.1”
                                            /db_xref=“GI:408407”
/translation=“KSELRINKASLADSGEYMCKVISKLGNDSASANITIVESNEIIT
GMPASTEGAYVSSESPIRISVSTEGANTSSSTSTSTTGTSHLVKCAEKEKTFCVNGGE
CFMVKDLSNPSRYLCKCPNEFTGDRCQNYVMASFYKHLGIEFMEAEELYQKRVLTITG
ICIALLVVGIMCVVAYCKTKKQRKKLHDRLRQSLRSERNNTMNIANGPHHPNPPPENV
QLVNQYVSKNVISSEHIVEREAETSFSTSHYTSTAHHSTTVTQTPSHSWSNGHTESIL
SESHSVIVMSSVENSRHSSPTGGPRGRLNGTGGPRECNSFLRHARETPDSYRDSPHSE
RYVSAMTTPARMSPVDFHTPSSPKSPPSEMSPPVSSMTVSMPSMAVSPFMEEERPLLL
VTPPRLREKKEDHHPQQFSSFHHNPAHDSNSLPASPLRIVEDEEYETTQEYEPAQEPV
KKLANSRRAKRTKPNGHIANRLEVDSNTSSQSSNSESETEDERVGEDTPFLGIQNPLA
ASLEATPAFRLADSRTNPAGRFSTQEEIQARLSSVIANQDPIAV”
                                            /note=“This partial sequence of Neu differentiation factor
                                            differs from the one in Genbank (GI: 408407) at residues 1
                                            (K instead of A) 201 CT instead of M) and 326 (S instead
                                            of F).”
          CDS
join (<1210711..1210744, 1219543..1219593, 1221864..1221914,
1332978..1333107, 1347040..1347107, 1347707..1347750)
                                            /gene=“NRG1”
                                            /codon_start=1
                                            /product=“Neu differentiation factor (partial)”
                                            /protein_id=“AAA19952.1”
                                            /db_xref=“GI:408405”
/translation=“ASANITIVESNEIITGMPASTEGAYVSSESPIRISVSTEGANTS
SSTSTSTTGTSHLVKCAEKEKTFCVNGGECFMVKDLSNPSRYLCKCQPGFTGARCTEN
                                            VPMKVQNQESAQMSLLVIAAKTT”
          exon 1219543..1219593
                                            /gene=“NRG1”
                                            /number=9
          exon 1221864..1221914
                                            /gene=“NRG1”
                                            /number=10
          exon 1252254..1253413
                                            /gene=“NRG1”
                                            /number=11
          CDS
join (1252747..1253413, 1332978..1333107, 1347707..1347800)
                                            /gene=“NRG1”
                                            /codon_start=1
                                            /product=“heregulin (sensory and motor neuron-derived
                                            factor)”
                                            /protein_id=“AAC41764.1”
                                            /db_xref=“GT:862423”
/translation=“MEIYSPDMSEVAAERSSSPSTQLSADPSLDGLPAAEDMPEPQTE
DGRTPGLVGLAVPCCACLEAERLRGCLNSEKICIVPILACLVSLCLCIAGLKWVFVDK
IFEYDSPTHLDPGGLGQDPIISLDATAASAVWVSSEAYTSPVSRAQSESEVQVTVQGD
KAVVSFEPSAAPTPKNRIFAFSFLPSTAPSFPSPTRNPEVRTPKSATQPQTTETNLQT
APKLSTSTSTTGTSHLVKCAEKEKTFCVNGGECFMVKDLSNPSRYLCKCPNEFTGDRC
                                            QNYVMASFYSTSTPFLSLPE”
          CDS
join (<1253089..1253413, 1332978..1333107, 1347707..1347765,
                                            1354621..1354644, 1359432..>1359481)
                                            /gene=“NRG1”
                                            /codon_start=1
                                            /product=“pACF-6_29” (clone ACF-6_29)
/translation=“GGLGQDPIISLDATAASAVWVSSEAYTSPVSRAQSESEVQVTVQ
GDKAVVSFEPSAAPTPKNRIFAFSFLPSTAPSFPSPTRNPEVRTPKSATQPQTTETNL
QTAPKLSTSTSTTGTSHLVKCAEKEKTFCVNGGECFMVKDLSNPSRYLCKCPNEFTGD
                                            RCQNYVMASFYKHLGIEFMEAEELYQKRVLTITGTC”
          CDS
join (<1253266..1253413, 1332978..1333107, 1347707..1347765,
                                            1359432..>1359481)
                                            /gene=“NRG1”
                                            /codon_start=1
                                            /product=“pSB-16A-c_61” (clone SB-16A-c_61)
/translation=“PKNRIFAFSFLPSTAPSFPSPTRNPEVRTPKSATQPQTTETNLQ
TAPKLSTSTSTTGTSHLVKCAEKEKTFCVNGGECFMVKDLSNPSRYLCKCPNEFTGDR
                                            GQNYVMASFYKAEELYQKRVLTITGIC”
          CDS
join (<1253347..1253413, 1332978..1333107, 1347707..1347765,
                                            1359432..>1359532)
                                            /gene=“NRG1”
                                            /codon_start=1
                                            /product=“pACF-20_09” (clone ACF-20_09)
/translation=“RTPKSATQPQTTETNLQTAPKLSTSTSTTGTSHLVKCAEKEKTF
CVNGGECFMVKDLSNPSRYLCKCPNEFTGDRCQNYVMASFYKAEELYQKRVLTITGIC
                                            IALLVVGIMCVVAYCKT”
          exon 1326782..1327071
                                            /gene=“NRG1”
                                            /number=12
          CDS
join (<1327011..1327071, 1332978..1333107, 1347040..1347107,
                                            1359432..>1359475)
                                            /gene=“NRG1”
                                            /codon_start=1
                                            /product=“pSB-18A-a_74” (clone SB-18A-a_74)
/translation=“DFKEQESMQIPKHISIEDITATSTSTTGTSHLVKCAEKEKTFCV
NGGECFMVKDLSNPSRYLCKCQPGFTGARCTENVPMKVQNQEKAEELYQKRVLTITG”
          CDS
join (1327032..1327071, 1332978..1333107, 1347707..1347765,
                                            1354621..1354644, 1359432..>1359481)
                                            /gene=“NRG1”
                                            /codon_start=1
                                            /product=“pACF-6_28” (clone ACF-6_28)
/translation=“MQIPKHISIEDITATSTSTTGTSHLVKCAEKEKTFCVNGGECFM
VKDLSNPSRYLCKCPNEFTGDRCQNYVMASFYKHLGIEFMEAEELYQKRVLTITGIC”
          CDS
join (1327032..1327071, 1347707..1347750)
                                            /gene=“NRG1”
                                            /codon_start=1
                                            /product=“pACF-10_41” (clone ACF-10_41)
                                            /translation=“MQIPKHISIEDITGAQMSLLVIAAKTT”
          exon 1332978..1333107
                                            /gene=“NRG1”
                                            /number=13a
          exon 1332978..1333652
                                            /gene=“NRG1”
                                            /number=13b
          CDS
join(<1333055..1333107, 1347040..1347107,
1354621..1354644, 1359432..1359534,
1361463..1361589, 1364363..1364493,
                                            1365257. .1365463, 1368811. .>1369147)
                                            /gene=“NRG1”
                                            /codon_start=1
                                            /product=“Neu differentiation factor (partial)”
                                            /proteinid=“AAA19950.1”
                                            /db_xref=“GI:408401”
/translation=“GECFMVKDLSNPSRYLCKCQPGFTGARCTENVPMKVQNQEKHLG
IEFMEAEELYQKRVLTITGICIALLVVGIMCVVAYCKTKKQRKKLHDRLRQSLRSERN
NTMNIANGPHHPNPPPENVQLVNQYVSKNVISSEHIVEREAETSFSTSHYTSTAHHST
TVTQTPSHSWSNGHTESILSESHSVIVMSSVENSRHSSPTGGPRGRLNGTGGPRECNS
FLRHARETPDSYRDSPHSERYVSANTTPARMSPVDFHTPSSPKSPPSEMSPPVSSMTV
SMPSMAVSPFMEEERPLLLVTPPRLREKKFDHHPQQFSSFHHNPAHDSNSLPASPLRI
                                            VEDEEYETTQEYEPAQ”
                                            /note=“This partial sequence of Neu differentiation factor
                                            differs from the Genbank one (GI: 408401) at residues 48
                                            (M instead of I), 104 (T instead of M) and 350 (Q instead of R).”
          exon 1347040..1347107
                                            /gene=“NRG1”
                                            /number=14
          exon 1347707..1347765
                                            /gene=“NRG1”
                                            /number=15a
          exon 1347707..1348257
                                            /gene=“NRG1”
                                            /number=15b
          exon 1354621..1354644
                                            /gene=“NRG1”
                                            /number=16
          exon 1359432..1359534
                                            /gene=“NRG1”
                                            /number=17
          CDS
join (1359506..1359534, 1361463..1361589, 1364363..1364493,
                                            1365257..1365467)
                                            /gene=“NRG1”
                                            /codon_start=1
                                            /product=“pACF-2_11” (clone ACF-2_11)
/translation=“MCVVAYCKTKKQRKKLHDRLRQSLRSERNNTMNIANGPHHPNPP
PENVQLVNQYVSKNVTSSEHIVEREAETSFSTSHYTSTAHHSTTVTQTPSHSWSNGHT
ESILSESHSVIVMSSVENSRHSSPTGGPRGRLNGTGGPRECNSFLRHARETPDSYRDS
                                            PHSER”
          exon 1361463..1361589
                                            /gene=“NRG1”
                                            /number=18
          exon 1364363..1364493
                                            /gene=“NRG1”
                                            /number=19
          exon 1365257..1365463
                                            /gene=“NRG1”
                                            /number=20a
          exon 1365257..1366044
                                            /gene=“NRG1”
                                            /number=20b
          exon 1368281..1368422
                                            /gene=“NRG1”
                                            /number=21
          exon 1368811..1369656
                                            /gene=“NRG1”
                                            /number=22
```

[0239] TABLE 2

Microsatellites, SNP's, and insertions/deletions in the
1.5 Mb sequence.

i) Previously known microsatellite markers in the 1.5 Mb sequence are:
D8S1711 Accession number: GDB:605902
D8S2319 Accession number: GDB:1298416
D8S1810 Accession number: GDB:613185
D8S1125 Accession number: GDB:684228
D8S1477 Accession number: GDB:686004
D8S278 Accession number: GDB:188295
ii) Novel polymorphic microsatellite markers in the 1.5 Mb sequence are:

| | |
|---|---|
| Marker | base nr |
| 29H12-1 | 16369-16598 |

| | |
|---|---|
| F: CAGTTCTGGAAACTTTTCTGTGTG | SEQ ID NO:40 |
| R: CAGATCCACAAGTTCTACAATAGCA | SEQ ID NO:41 |

| | |
|---|---|
| 29H12-7320 | 21839-21955 |

| | |
|---|---|
| F: TTTTCTTTACTGGTGCTCTCTAGTGT | SEQ ID NO:42 |
| R: TGCAGGCATAGAATTCTCCA | SEQ ID NO:43 |

| | |
|---|---|
| 29H12-123E24 | 69332-69206 |

| | |
|---|---|
| F: GAGTAGTTGGGACTACAGATGCACAC | SEQ ID NO:44 |
| R: CAGCTTGGGCAACAAAGTAAG | SEQ ID NO:45 |

| | |
|---|---|
| 29H12-2 | 70671-70830 |

| | |
|---|---|
| F: CTCAAATTTTGGGGGCTCAC | SEQ ID NO:46 |
| R: CAATATTATACAATTTCTGGCAGCAT | SEQ ID NO:47 |

| | |
|---|---|
| 29H12-121L21 | 136728-136926 |

| | |
|---|---|
| F: ATACTGAAGGGCAGGGGTTT | SEQ ID NO:48 |
| R: ATTTTCTGGGTGATTTCCTCATT | SEQ ID NO:49 |

| | |
|---|---|
| 450K14-72458 | 215725-215881 |

| | |
|---|---|
| F: AGGCTTCTGGACCCTCAAAT | SEQ ID NO:50 |
| R: CTCAGCTTTGCCCTCTGAAT | SEQ ID NO:51 |

| | |
|---|---|
| 478B14-642 | 240205-240451 |

| | |
|---|---|
| F: AGGGCAGGAACCTTTCATCT | SEQ ID NO:52 |
| R: TAGCGAGAAAGTTGGGGAGA | SEQ ID NO:53 |

| | |
|---|---|
| 487-2 | 317814-318014 |

| | |
|---|---|
| F: AGTGAGTAGGGCTGGCTGCT | SEQ ID NO:54 |
| R: GCTGCTAATATGGCCCCTTC | SEQ ID NO:55 |

| | |
|---|---|
| 478B14-848 | 336198-336417 |

| | |
|---|---|
| F: CCACATGTCCAACTGAAGAGG | SEQ ID NO:56 |
| R: TCTCCATGTGTAAAACAATACATATCA | SEQ ID NO:57 |

| | |
|---|---|
| 420M9-1395 | 412817-413095 |

| | |
|---|---|
| F: CTTTTAATCATGAAAGAATAGCAAAAA | SEQ ID NO:58 |
| R: TGTTGTTGTATATTTCAGAATTTCCTT | SEQ ID NO:59 |

| | |
|---|---|
| 420M9-1 | 435175-435396 |

| | |
|---|---|
| GGCATGTCCGAATTTGGTT | SEQ ID NO:60 |
| TGTCCCAGCTGATCTAAGCA | SEQ ID NO:61 |

| | |
|---|---|
| 420M9-3663 | 449780-450121 |

| | |
|---|---|
| F: GAGTTTTGAGGATCCTAGAGCAA | SEQ ID NO:62 |
| R: GAAGGGCTAAAAGGAGAATTCATA | SEQ ID NO:63 |

| | |
|---|---|
| 420M9-116112 | 472938-473197 |

| | |
|---|---|
| F: TTTGCTTATGGTGTCATTCTTTC | SEQ ID NO:64 |
| R: GGAGTTCCTGGGTTCTAATCTC | SEQ ID NO:65 |

| | |
|---|---|
| 420M9-14377 | 526307-526642 |

| | |
|---|---|
| F: CCACAGCATGCAAAATGAAC | SEQ ID NO:66 |
| R: TGTAGGATGCCAAGGAGGTT | SEQ ID NO:67 |

| | |
|---|---|
| 473C15-533 | 581585-581741 |

| | |
|---|---|
| F: GGCAGCAATACAAACACAGC | SEQ ID NO:68 |
| R: CTAGGGTCAATGGGTGAGGA | SEQ ID NO:69 |

| | |
|---|---|
| 473C15-439 | 647726-648013 |

| | |
|---|---|
| F: TTTGGGATGTTTCAGCCATT | SEQ ID NO:70 |
| R: TGGAAGGCTCCATGAAAGTG | SEQ ID NO:71 |

| | |
|---|---|
| 72H22-1 | 684024-684174 |

| | |
|---|---|
| AGAAGCAAGGATCCCCAGTT | SEQ ID NO:72 |
| GCAAACATAAAGTATGACCCCTTG | SEQ ID NO:73 |

| | |
|---|---|
| 82H10-79B8 | 761958-762080 |

| | |
|---|---|
| F: ACATTGCCTCCAACCAAGTC | SEQ ID NO:74 |
| R: CAGGTATGAGCCACCTCTCC | SEQ ID NO:75 |

| | |
|---|---|
| 72H22-36 | 798203-798323 |

| | |
|---|---|
| F: TGCAGCAGTAGTGACCCTGT | SEQ ID NO:76 |
| R: ATCACCCTGACACTGAGGAGA | SEQ ID NO:77 |

| | |
|---|---|
| 244L21-750 | 826723-827056 |

| | |
|---|---|
| F: GGCCTGGAAAAAGTGTGTGT | SEQ ID NO:78 |
| R: GCCCGTGAATCTCTTGTGTT | SEQ ID NO:79 |

| | |
|---|---|
| 244L21-8557 | 912541-912691 |

| | |
|---|---|
| F: GCAACTTCATGCCTGTAGCA | SEQ ID NO:80 |
| R: CACCCTGTGAAAATGGCTCT | SEQ ID NO:81 |

| | |
|---|---|
| 244L21-17088 | 949194-949478 |

| | |
|---|---|
| F: GGTTCTTCGAAATGGCAAGT | SEQ ID NO:82 |
| R: GGCGAGCAGAGTGAGACAC | SEQ ID NO:83 |

| | |
|---|---|
| 225C17-1 | 1012241-1012388 |

| | |
|---|---|
| F: TCTGTGACGCAATTCAATGAT | SEQ ID NO:84 |
| R: ACCAGCCTGGCTTTAAAACAT | SEQ ID NO:85 |

| | |
|---|---|
| 225C17-3 | 1051863-1052153 |

| | |
|---|---|
| F: GCAAAGCTTCTCCACACTCC | SEQ ID NO:86 |
| R: AACCTGGAGGTTCAAGTGGA | SEQ ID NO:87 |

| | |
|---|---|
| 225C17-4 | 1087296-1087572 |

| | |
|---|---|
| F: TGTCACTATGGGCCACTGAA | SEQ ID NO:88 |
| R: GAAAAGCATGGCAGATTTGA | SEQ ID NO:89 |

| | |
|---|---|
| 317J8-2123 | 1130273-1130517 |

| | |
|---|---|
| F: CCCAGAAAGCAGGCAAGTAG | SEQ ID NO:90 |
| R: CATGAAAAAGACGCAAGCAA | SEQ ID NO:91 |

| | |
|---|---|
| 317J8-1 | 1152587-1152721 |

| | |
|---|---|
| F: CCCTTAGAAGAGGCCAGGTT | SEQ ID NO:92 |
| R: AGGTTGCGCTCTCCTGCT | SEQ ID NO:93 |

| | |
|---|---|
| 317J8-2 | 1205197-1205453 |

| | |
|---|---|
| F: TTAGCCAAGCACAGTGGTGT | SEQ ID NO:94 |
| R: TTGGTTCCCTGACCCCTAA | SEQ ID NO:95 |

| | |
|---|---|
| 317J8-4858 | 1245572-1245761 |

| | |
|---|---|
| F: ACAGGAAGACTGCCATTTGC | SEQ ID NO:96 |
| R: AAGCCTTTGCTCATGTTCTCA | SEQ ID NO:97 |

| | |
|---|---|
| S8S61144 | 1353342-1353494 |

| | |
|---|---|
| F: AAATTTCATGATGCGGAAGG | SEQ ID NO:98 |
| R: ACGCTTTGACCACACACA | SEQ ID NO:99 |

| | |
|---|---|
| S8S4792 | 1366527-1366755 |

| | |
|---|---|
| F: CCCATGGAACTACCACAGAA | SEQ ID NO: 100 |
| R: AGGGCCTTTCCTTCAAAATG | SEQ ID NO: 101 |

| | |
|---|---|
| S8S1765 | 1477309-1477601 |

| | |
|---|---|
| F: AAGCAGCAGGCAAAATGAGT | SEQ ID NO: 102 |
| R: GATGCAAAGGCAAGTCGAGT | SEQ ID NO: 103 |

iii) Single nucleotide polymorphisms in exons:

| | |
|---|---|
| a) NRG1 exon | |
| E1006A | SEQ ID NO:104 |
| E592A | SEQ ID NO:105 |
| E178A | SEQ ID NO:106 |
| E51Aa | SEQ ID NO:107 |
| E1160A | SEQ ID NO:108 |
| E675A | SEQ ID NO:109 |
| E103A | SEQ ID NO:110 |
| E127A | SEQ ID NO:111 |
| E846A | SEQ ID NO:112 |
| b) NRG1AG1 exon | |
| E558B | SEQ ID NO:113 |
| E178B | SEQ ID NO:114 |
| E262B | SEQ ID NO:115 |

iv) Single nucleotide polymorphisms in the 1.5 Mb sequence:

| | |
|---|---|
| >SNP8NRG60_allelePos=60 total len = 260 SNP=Y chr8 | SEQ ID NO:116 |
| >SNP8NRG179_allelePos=179 total len = 379 SNP=W chr8 | SEQ ID NO:117 |
| >SNP8NRG397_allelePos=201 total len = 401 SNP=R chr8 | SEQ ID NO:118 |
| >SNP8NRG410_allelePos=201 total len = 401 SNP=R chr8 | SEQ ID NO:119 |
| >SNP8NRG653_allelePos=201 total len = 401 SNP=W chr8 | SEQ ID NO:120 |
| >SNP8NRG1672_allelePos=201 total len = 401 SNP=Y chr8 | SEQ ID NO:121 |
| >SNP8NRG1959_allelePos=201 total len = 401 SNP=Y chr8 | SEQ ID NO:122 |
| >SNP8NRG2464_allelePos=201 total len = 401 SNP=R chr8 | SEQ ID NO:123 |
| >SNP8NRG4446_allelePos=201 total len = 401 SNP=M chr8 | SEQ ID NO:124 |
| >SNP8NRG4463_allelePos=201 total len = 401 SNP=Y chr8 | SEQ ID NO:125 |
| >SNP8NRG458O_allelePos=201 total len = 401 SNP=S chr8 | SEQ ID NO:126 |
| >SNP8NRG5461_allelePos=201 total len = 401 SNP=Y chr8 | SEQ ID NO:127 |
| >SNP8NRG5893_allelePos=201 total len = 401 SNP=W chr8 | SEQ ID NO:128 |
| >SNP8NRG6597_allelePos=201 total len = 401 SNP=R chr8 | SEQ ID NO:129 |
| >SNP8NRG6662_allelePos=201 total len = 401 SNP=R chr8 | SEQ ID NO:130 |
| >SNP8NRG6787_allelePos=201 total len = 401 SNP=S chr8 | SEQ ID NO:131 |
| >SNP8NRG6844_allelePos=201 total len = 401 SNP=Y chr8 | SEQ ID NO:132 |
| SNP8NRG7475_allelePos=201 total len = 401 SNP=Y chr8 | SEQ ID NO:133 |
| >SNP8NRG7519_allelePos=201 total len = 401 SNP=R chr8 | SEQ ID NO:134 |
| >SNP8NRG8707_allelePos=201 total len = 401 SNP=Y chr8 | SEQ ID NO:135 |
| >SNP8NRG8841_allelePos=201 total len = 401 SNP=R chr8 | SEQ ID NO:136 |
| >SNP8NRG9062_allelePos=201 total len = 401 SNP=Y chr8 | SEQ ID NO:137 |
| >SNP8NRG9085_allelePos=201 total len = 401 SNP=R chr8 | SEQ ID NO:138 |
| >SNP8NRG9101_allelePos=201 total len = 401 SNP=M chr8 | SEQ ID NO:139 |
| >SNP8NRG10174_allelePos=201 total len = 401 SNP=Y chr8 | SEQ ID NO:140 |
| >SNP8NRG10497_allelePos=201 total len = 401 SNP=Y chr8 | SEQ ID NO:141 |
| >SNP8NRG10687_aIlelePos=201 total len = 401 SNP=W chr8 | SEQ ID NO:142 |
| >SNP8NRG11026_allelePos=201 total len = 401 SNP=S chr8 | SEQ ID NO:143 |
| >SNP8NRG11116_allelePos=201 total len = 401 SNP=R chr8 | SEQ ID NO:144 |
| >SNP8NRG11189_allelePos=201 total len = 401 SNP=R chr8 | SEQ ID NO:145 |
| >SNP8NRG11306_aIlelePos=201 total len = 401 SNP=Y chr8 | SEQ ID NO:146 |
| >SNP8NRG11453_allelePos=201 total len = 401 SNP=W chr8 | SEQ ID NO:147 |
| >SNP8NRG11816_allelePos=201 total len = 401 SNP=R chr8 | SEQ ID NO:148 |
| >SNP8NRG12009_allelePos=201 total len = 401 SNP=K chr8 | SEQ ID NO:149 |
| >SNP8NRG12264_aIlelePos=201 total len = 401 SNP=R chr8 | SEQ ID NO:150 |
| >SNP8NRG12867_allelePos=201 total len = 401 SNP=Y chr8 | SEQ ID NO:151 |
| >SNP8NRG13358_allelePos=201 total len = 401 SNP=Y chr8 | SEQ ID NO:152 |
| >SNP8NRG15643_allelePos=201 total len = 401 SNP=R chr8 | SEQ ID NO:153 |
| >SNP8NRG15645_allelePos=201 total len = 401 SNP=M chr8 | SEQ ID NO:154 |
| >SNP8NRG15804_allelePos=201 total len = 401 SNP=Y chr8 | SEQ ID NO:155 |
| >SNP8NRG18233_allelePos=201 total len = 401 SNP=W chr8 | SEQ ID NO:156 |
| >SNP8NRG1987L_allelePos=201 total len = 401 SNP=R chr8 | SEQ ID NO:157 |
| >SNP8NRG20056_allelePos=201 total len = 401 SNP=R chr8 | SEQ ID NO:158 |
| >SNP8NRG20969_allelePos=201 total len = 401 SNP=R chr8 | SEQ ID NO:159 |
| >SNP8NRG21091_allelePos=201 total len = 401 SNP=M chr8 | SEQ ID NO:160 |
| >SNP8NRG24917_allelePos=201 total len = 401 SNP=Y chr8 | SEQ ID NO:161 |
| >SNP8NRG26481_allelePos=201 total len = 401 SNP=R chr8 | SEQ ID NO:162 |
| >SNP8NRG26580_allelePos=201 total len = 401 SNP=R chr8 | SEQ ID NO:163 |
| >SNP8NRG28434_allelePos=201 total len = 401 SNP=R chr8 | SEQ ID NO:164 |
| >SNP8NRG28440_allelePos=201 total len = 401 SNP=Y chr8 | SEQ ID NO:165 |
| >SNP8NRG29152_allelePos=201 total len = 401 SNP=Y chr8 | SEQ ID NO:166 |
| >SNP8NRG30168_allelePos=201 total len = 401 SNP=Y chr8 | SEQ ID NO:167 |
| >SNP8NRG30176_allelePos=201 total len = 401 SNP=Y chr8 | SEQ ID NO:168 |
| >SNP8NRG31792_allelePos=201 total len = 401 SNP=W chr8 | SEQ ID NO:169 |
| >SNP8NRG34543_allelePos=201 total len = 401 SNP=Y chr8 | SEQ ID NO:170 |
| >SNP8NRG35406_allelePos=201 total len = 401 SNP=W chr8 | SEQ ID NO:171 |
| >SNP8NRG37394_allelePos=201 total len = 401 SNP=M chr8 | SEQ ID NO:172 |
| >SNP8NRG41184_allelePos=201 total len = 401 SNP=Y chr8 | SEQ ID NO:173 |
| >SNP8NRG41634_allelePos=201 total len = 401 SNP=R chr8 | SEQ ID NO:174 |
| >SNP8NRG42449_allelePos=201 total len = 401 SNP=R chr8 | SEQ ID NO:175 |
| >SNP8NRG44643_allelePos=201 total len = 401 SNP=R chr8 | SEQ ID NO:176 |
| >SNP8NRG45727_allelePos=201 total len = 401 SNP=Y chr8 | SEQ ID NO:177 |
| >SNP8NRG49800_allelePos=201 total len = 401 SNP=R chr8 | SEQ ID NO:178 |
| >SNP8NRG50772_allelePos=201 total len = 401 SNP=Y chr8 | SEQ ID NO:179 |
| >SNP8NRG51243_allelePos=201 total len = 401 SNP=Y chr8 | SEQ ID NO:180 |
| >SNP8NRG51606_allelePos=201 total len = 401 SNP=S chr8 | SEQ ID NO:181 |
| >SNP8NRG52942_allelePos=201 total len = 401 SNP=Y chr8 | SEQ ID NO:182 |
| >SNP8NRG54357_allelePos=201 total len = 401 SNP=W chr8 | SEQ ID NO:183 |
| >SNP8NRG54532_allelePos=201 total len = 401 SNP=S chr8 | SEQ ID NO:184 |
| >SNP8NRG58041_allelePos=201 total len = 401 SNP=R chr8 | SEQ ID NO:185 |
| >SNP8NRG59140_allelePos=201 total len = 401 SNP=W chr8 | SEQ ID NO:186 |
| >SNP8NRG59214_allelePos=201 total len = 401 SNP=M chr8 | SEQ ID NO:187 |
| >SNP8NRG60484_allelePos=201 total len = 401 SNP=S chr8 | SEQ ID NO:188 |
| >SNP8NRG60920_allelePos=201 total len = 401 SNP=Y chr8 | SEQ ID NO:189 |
| >SNP8NRG62524_allelePos=201 total len = 401 SNP=Y chr8 | SEQ ID NO:190 |
| >SNP8NRG62537_allelePos=201 total len = 401 SNP=Y chr8 | SEQ ID NO:191 |
| >SNP8NRG62674_allelePos=201 total len = 401 SNP=Y chr8 | SEQ ID NO:192 |
| >SNP8NRG63383_allelePos=201 total len = 401 SNP=R chr8 | SEQ ID NO:193 |
| >SNP8NRG63548_allelePos=201 total len = 401 SNP=K chr8 | SEQ ID NO:194 |
| >SNP8NRG64088_allelePos=201 total len = 401 SNP=W chr8 | SEQ ID NO:195 |
| >SNP8NRG68231_allelePos=201 total len = 401 SNP=S chr8 | SEQ ID NO:196 |
| >SNP8NRG686O1_allelePos=201 total len = 401 SNP=K chr8 | SEQ ID NO:197 |
| >SNP8NRG69266_allelePos=201 total len = 401 SNP=R chr8 | SEQ ID NO:198 |
| >SNP8NRG72685_allelePos=201 total len = 401 SNP=M chr8 | SEQ ID NO:199 |
| >SNP8NRG73520_allelePos=201 total len = 401 SNP=Y chr8 | SEQ ID NO:200 |
| >SNP8NRG79184_allelePos=201 total len = 401 SNP=S chr8 | SEQ ID NO:201 |
| >SNP8NRG80068_allelePos=201 total len = 401 SNP=Y chr8 | SEQ ID NO:202 |
| >SNP8NRG80895_allelePos=201 total len = 401 SNP=W chr8 | SEQ ID NO:203 |
| >SNP8NRG85217_allelePos=201 total len = 401 SNP=S chr8 | SEQ ID NO:204 |
| >SNP8NRG86326_allelePos=201 total len = 401 SNP=M chr8 | SEQ ID NO:205 |
| >SNP8NRG86768_allelePos=201 total len = 401 SNP=R chr8 | SEQ ID NO:206 |
| >SNP8NRG87893_allelePos=201 total len = 401 SNP=W chr8 | SEQ ID NO:207 |
| >SNP8NRG88520_aIlelePos=201 total len = 401 SNP=Y chr8 | SEQ ID NO:208 |
| >SNP8NRG88820_allelePos=201 total len = 401 SNP=R chr8 | SEQ ID NO:209 |
| >SNP8NRG89613_allelePos=201 total len = 401 SNP=Y chr8 | SEQ ID NO:210 |
| >SNP8NRG89692_allelePos=201 total len = 401 SNP=Y chr8 | SEQ ID NO:211 |
| >SNP8NRG89722_allelePos=201 total len = 401 SNP=S chr8 | SEQ ID NO:212 |
| >SNP8NRG89835_allelePos=201 total len = 401 SNP=Y chr8 | SEQ ID NO:213 |
| >SNP8NRG90089_allelePos=201 total len = 401 SNP=R chr8 | SEQ ID NO:214 |
| >SNP8NRG90379_allelePos=201 total len = 401 SNP=K chr8 | SEQ ID NO:215 |
| >SNP8NRG90385_allelePos=201 total len = 401 SNP=S chr8 | SEQ ID NO:216 |
| >SNP8NRG90389_allelePos=201 total len = 401 SNP=Y chr8 | SEQ ID NO:217 |
| >SNP8NRG90559_allelePos=201 total len = 401 SNP=Y chr8 | SEQ ID NO:218 |
| >SNP8NRG91128_allelePos=201 total len = 401 SNP=R chr8 | SEQ ID NO:219 |
| >SNP8NRG91178_allelePos=201 total len = 401 SNP=R chr8 | SEQ ID NO:220 |
| >SNP8NRG91814_allelePos=201 total len = 401 SNP=Y chr8 | SEQ ID NO:221 |
| >SNP8NRG92080_allelePos=201 total len = 401 SNP=S chr8 | SEQ ID NO:222 |
| >SNP8NRG92366_allelePos=201 total len = 401 SNP=R chr8 | SEQ ID NO:223 |
| >SNP8NRG92986_allelePos=201 total len = 401 SNP=K chr8 | SEQ ID NO:224 |
| >SNP8NRG93253_allelePos=201 total len = 401 SNP=K chr8 | SEQ ID NO:225 |
| >SNP8NRG93675_allelePos=201 total len = 401 SNP=Y chr8 | SEQ ID NO:226 |
| >SNP8NRG94052_allelePos=201 total len = 401 SNP=Y chr8 | SEQ ID NO:227 |
| >SNP8NRG94333_allelePos=201 total len = 401 SNP=R chr8 | SEQ ID NO:228 |
| >SNP8NRG94423_allelePos=201 total len = 401 SNP=Y chr8 | SEQ ID NO:229 |
| >SNP8NRG94601_allelePos=201 total len = 401 SNP=Y chr8 | SEQ ID NO:230 |
| >SNP8NRG94623_allelePos=201 total len = 401 SNP=K chr8 | SEQ ID NO:231 |
| >SNP8NRG95023_allelePos=201 total len = 401 SNP=Y chr8 | SEQ ID NO:232 |
| >SNP8NRG95049_allelePos=201 total len = 401 SNP=S chr8 | SEQ ID NO:233 |
| >SNP8NRG95238_allelePos=201 total len = 401 SNP=R chr8 | SEQ ID NO:234 |
| >SNP8NRG95632_allelePos=201 total len = 401 SNP=R chr8 | SEQ ID NO:235 |
| >SNP8NRG95660_allelePos=201 total len = 401 SNP=R chr8 | SEQ ID NO:236 |
| >SNP8NRG96256_allelePos=201 total len = 401 SNP=Y chr8 | SEQ ID NO:237 |
| >SNP8NRG96258_allelePos=201 total len = 401 SNP=Y chr8 | SEQ ID NO:238 |
| >SNP8NRG96304_allelePos=201 total len = 401 SNP=Y chr8 | SEQ ID NO:239 |
| >SNP8NRG96837_allelePos=201 total len = 401 SNP=R chr8 | SEQ ID NO:240 |
| >SNP8NRG97323_allelePos=201 total len = 401 SNP=K chr8 | SEQ ID NO:241 |
| >SNP8NRG97462_allelePos=201 total len = 401 SNP=Y chr8 | SEQ ID NO:242 |
| >SNP8NRG97535_allelePos=201 total len = 401 SNP=R chr8 | SEQ ID NO:243 |
| >SNP8NRG97919_allelePos=201 total len = 401 SNP=S chr8 | SEQ ID NO:244 |
| >SNP8NRG98037_allelePos=201 total len = 401 SNP=R chr8 | SEQ ID NO:245 |
| >SNP8NRG98839_allelePos=201 total len = 401 SNP=R chr8 | SEQ ID NO:246 |
| >SNP8NRG99868_allelePos=201 total len = 401 SNP=R chr8 | SEQ ID NO:247 |
| >SNP8NRG99869_allelePos=201 total len = 401 SNP=R chr8 | SEQ ID NO:248 |
| >SNP8NRG100779_allelePos=201 total len = 401 SNP=W chr8 | SEQ ID NO:249 |
| >SNP8NRG100833_allelePos=201 total len = 401 SNP=Y chr8 | SEQ ID NO:250 |
| >SNP8NRG100857_allelePos=201 total len = 401 SNP=Y chr8 | SEQ ID NO:251 |
| >SNP8NRG101112_alIelePos=201 total len = 401 SNP=Y chr8 | SEQ ID NO:252 |
| >SNP8NRG101613_allelePos=201 total len = 401 SNP=R chr8 | SEQ ID NO:253 |
| >SNP8NRG101730_allelePos=201 total len = 401 SNP=R chr8 | SEQ ID NO:254 |
| >SNP8NRG101822_allelePos=201 total len = 401 SNP=Y chr8 | SEQ ID NO:255 |
| >SNP8NRG102260_allelePos=201 total len = 401 SNP=S chr8 | SEQ ID NO:256 |
| >SNP8NRG102914_allelePos=201 total len = 401 SNP=R chr8 | SEQ ID NO:257 |
| >SNP8NRG103471_allelePos=201 total len = 401 SNP=W chr8 | SEQ ID NO:258 |
| >SNP8NRG104188_allelePos=201 total len = 401 SNP=Y chr8 | SEQ ID NO:259 |
| >SNP8NRG104511_allelePos=201 total len = 401 SNP=Y chr8 | SEQ ID NO:260 |
| >SNP8NRG104656_allelePos=201 total len = 401 SNP=M chr8 | SEQ ID NO:261 |
| >SNP8NRG105171_allelePos=201 total len = 401 SNP=W chr8 | SEQ ID NO:262 |
| >SNP8NRG105682_allelePos=201 total len = 401 SNP=R chr8 | SEQ ID NO:263 |
| >SNP8NRG105709_allelePos=201 total len = 401 SNP=R chr8 | SEQ ID NO:264 |
| >SNP8NRG105754_allelePos=201 total len = 401 SNP=W chr8 | SEQ ID NO:265 |
| >SNP8NRG107648_allelePos=201 total len = 401 SNP=Y chr8 | SEQ ID NO:266 |
| >SNP8NRG107724_allelePos=201 total len = 401 SNP=K chr8 | SEQ ID NO:267 |
| >SNP8NRG108240_allelePos=201 total len = 401 SNP=Y chr8 | SEQ ID NO:268 |
| >SNP8NRG109187_allelePos=201 total len = 401 SNP=K chr8 | SEQ ID NO:269 |
| >SNP8NRG109573_allelePos=201 total len = 401 SNP=Y chr8 | SEQ ID NO:270 |
| >SNP8NRG109902_allelePos=201 total len = 401 SNP=K cbr8 | SEQ ID NO:271 |
| >SNP8NRG110341_allelePos=201 total len = 401 SNP=M chr8 | SEQ ID NO:272 |
| >SNP8NRG111192_allelePos=201 total len = 401 SNP=Y chr8 | SEQ ID NO:273 |
| >SNP8NRG112369_allelePos=201 total len = 401 SNP=Y chr8 | SEQ ID NO:274 |
| >SNP8NRG112601_allelePos=201 total len = 401 SNP=W chr8 | SEQ ID NO:275 |
| >SNP8NRG112715_allelePos=201 total len = 401 SNP=W chr8 | SEQ ID NO:276 |
| >SNP8NRGL13225_allelePos=201 total len = 401 SNP=R chr8 | SEQ ID NO:277 |
| >SNP8NRG113961_allelePos=201 total len = 401 SNP=R chr8 | SEQ ID NO:278 |
| >SNP8NRG114283_allelePos=201 total len = 401 SNP=S chr8 | SEQ ID NO:279 |
| >SNP8NRG114425_allelePos=201 total len = 401 SNP=R chr8 | SEQ ID NO:280 |
| >SNP8NRG114558_allelePos=201 total len = 401 SNP=W chr8 | SEQ ID NO:281 |
| >SNP8NRGl14765_allelePos=201 total len = 401 SNP=M chr8 | SEQ ID NO:282 |
| >SNP8NRG114983_alIelePos=201 total len = 401 SNP=Y chr8 | SEQ ID NO:283 |
| >SNP8NRG115195_allelePos=201 total len = 401 SNP=Y chr8 | SEQ ID NO:284 |
| >SNP8NRG115591_allelePos=201 total len = 401 SNP=K chr8 | SEQ ID NO:285 |
| >SNP8NRG115659_allelePos=201 total len = 401 SNP=W chr8 | SEQ ID NO:286 |
| >SNP8NRG115667_allelePos=201 total len = 401 SNP=M chr8 | SEQ ID NO:287 |
| >SNP8NRG116534_allelePos=201 total len = 401 SNP=Y chr8 | SEQ ID NO:288 |
| >SNP8NRG117073_allelePos=201 total len = 401 SNP=Y chr8 | SEQ ID NO:289 |
| >SNP8NRG117083_allelePos=201 total len = 401 SNP=Y chr8 | SEQ ID NO:290 |
| >SNP8NRG117604_allelePos=201 total len = 401 SNP=K chr8 | SEQ ID NO:291 |
| >SNP8NRG117831_allelePos=201 total len = 401 SNP=Y chr8 | SEQ ID NO:292 |
| >SNP8NRG118982_allelePos=201 total len = 401 SNP=Y chr8 | SEQ ID NO:293 |
| >SNP8NRG119101_allelePos=201 total len = 401 SNP=R chr8 | SEQ ID NO:294 |
| >SNP8NRG119171_allelePos=201 total len = 401 SNP=M chr8 | SEQ ID NO:295 |
| >SNP8NRG119275_allelePos=201 total len = 401 SNP=W chr8 | SEQ ID NO:296 |
| >SNP8NRG119328_allelePos=201 total len = 401 SNP=R chr8 | SEQ ID NO:297 |
| >SNP8NRG120000_allelePos=201 total len = 401 SNP=Y chr8 | SEQ ID NO:298 |
| >SNP8NRG120293_allelePos=201 total len = 401 SNP=Y chr8 | SEQ ID NO:299 |
| >SNP8NRG121195_allelePos=201 total len = 401 SNP=M chr8 | SEQ ID NO:300 |
| >SNP8NRG121808_allelePos=201 total len = 401 SNP=Y chr8 | SEQ ID NO:301 |
| >SNP8NRG121885_allelePos=201 total len = 401 SNP=R chr8 | SEQ ID NO:302 |
| >SNP8NRG122038_allelePos=201 total len = 401 SNP=S chr8 | SEQ ID NO:303 |
| >SNP8NRG122384_allelePos=201 total len = 401 SNP=R chr8 | SEQ ID NO:304 |
| >SNP8NRG122422_allelePos=201 total len = 401 SNP=K chr8 | SEQ ID NO:305 |
| >SNP8NRG122462_allelePos=201 total len = 401 SNP=R chr8 | SEQ ID NO:306 |
| >SNP8NRG122634_allelePos=201 total len = 401 SNP=S chr8 | SEQ ID NO:307 |
| >SNP8NRG123153_allelePos=201 total len = 401 SNP=S chr8 | SEQ ID NO:308 |
| >SNP8NRG123455_allelePos=201 total len = 401 SNP=M chr8 | SEQ ID NO:309 |
| >SNP8NRG123986_allelePos=201 total len = 401 SNP=R chr8 | SEQ ID NO:310 |
| >SNP8NRG124030_allelePos=201 total len = 401 SNP=Y chr8 | SEQ ID NO:311 |
| >SNP8NRG124439_allelePos=201 total len = 401 SNP=Y chr8 | SEQ ID NO:312 |
| >SNP8NRG124558_allelePos=201 total len = 401 SNP=W chr8 | SEQ ID NO:313 |
| >SNP8NRG124752_allelePos=201 total len = 401 SNP=Y chr8 | SEQ ID NO:314 |
| >SNP8NRG125677_allelePos=201 total len = 401 SNP=Y chr8 | SEQ ID NO:315 |
| >SNP8NRG126412_allelePos=201 total len = 401 SNP=R chr8 | SEQ ID NO:316 |
| >SNP8NRG130571_allelePos=201 total len = 401 SNP=R chr8 | SEQ ID NO:317 |
| >SNP8NRG130654_allelePos=201 total len = 401 SNP=Y chr8 | SEQ ID NO:318 |
| >SNP8NRG132490_allelePos=201 total len = 401 SNP=W chr8 | SEQ ID NO:319 |
| >SNP8NRG132499_allelePos=201 total len = 401 SNP=S chr8 | SEQ ID NO:320 |
| >SNP8NRG133473_allelePos=201 total len = 401 SNP=R chr8 | SEQ ID NO:321 |
| >SNP8NRG133691_allelePos=201 total len = 401 SNP=Y chr8 | SEQ ID NO:322 |
| >SNP8NRG133884_allelePos=201 total len = 401 SNP=W chr8 | SEQ ID NO:323 |
| >SNP8NRG134648_allelePos=201 total len = 401 SNP=R chr8 | SEQ ID NO:324 |
| >SNP8NRG135038_allelePos=201 total len = 401 SNP=K chr8 | SEQ ID NO:325 |
| >SNP8NRG135255_allelePos=201 total len = 401 SNP=Y chr8 | SEQ ID NO:326 |
| >SNP8NRG135413_allelePos=201 total len = 401 SNP=Y chr8 | SEQ ID NO:327 |
| >SNP8NRG135774_allelePos=201 total len = 401 SNP=W chr8 | SEQ ID NO:328 |
| >SNP8NRG135802_allelePos=201 total len = 401 SNP=Y chr8 | SEQ ID NO:329 |
| >SNP8NRG136202_allelePos=201 total len = 401 SNP=R chr8 | SEQ ID NO:330 |
| >SNP8NRG137376_allelePos=201 total len = 401 SNP=M chr8 | SEQ ID NO:331 |
| >SNP8NRG137576_allelePos=201 total len = 401 SNP=R chr8 | SEQ ID NO:332 |
| >SNP8NRG137699_allelePos=201 total len = 401 SNP=Y chr8 | SEQ ID NO:333 |
| >SNP8NRG138626_allelePos=201 total len = 401 SNP=R chr8 | SEQ ID NO:334 |
| >SNP8NRG139056_allelePos=201 total len = 401 SNP=Y chr8 | SEQ ID NO:335 |
| >SNP8NRG139274_allelePos=201 total len = 401 SNP=R chr8 | SEQ ID NO:336 |
| >SNP8NRG139281_allelePos=201 total len = 401 SNP=Y chr8 | SEQ ID NO:337 |
| >SNP8NRG140116_allelePos=201 total len = 401 SNP=M chr8 | SEQ ID NO:338 |
| >SNP8NRG140571_allelePos=201 total len = 401 SNP=R chr8 | SEQ ID NO:339 |
| >SNP8NRG140710_allelePos=201 total len = 401 SNP=S chr8 | SEQ ID NO:340 |
| >SNP8NRG140746_allelePos=201 total len = 401 SNP=R chr8 | SEQ ID NO:341 |
| >SNP8NRG141610_allelePos=201 total len = 401 SNP=R chr8 | SEQ ID NO:342 |
| >SNP8NRG141794_allelePos=201 total len = 401 SNP=Y chr8 | SEQ ID NO:343 |
| >SNP8NRG142053_allelePos=201 total len = 401 SNP=R chr8 | SEQ ID NO:344 |
| >SNP8NRG142994_allelePos=201 total len = 401 SNP=R chr8 | SEQ ID NO:345 |
| >SNP8NRG145525_allelePos=201 total len = 401 SNP=Y chr8 | SEQ ID NO:346 |
| >SNP8NRG147116_allelePos=201 total len = 401 SNP=R chr8 | SEQ ID NO:347 |
| >SNP8NRG147238_allelePos=201 total len = 401 SNP=Y chr8 | SEQ ID NO:348 |
| >SNP8NRG147778_allelePos=201 total len = 401 SNP=Y chr8 | SEQ ID NO:349 |
| >SNP8NRG148986_allelePos=201 total len = 401 SNP=W chr8 | SEQ ID NO:350 |
| >SNP8NRG149066_allelePos=201 total len = 401 SNP=R chr8 | SEQ ID NO:351 |
| >SNP8NRG150876_allelePos=201 total len = 401 SNP=K chr8 | SEQ ID NO:352 |
| >SNP8NRG151576_allelePos=201 total len = 401 SNP=R chr8 | SEQ ID NO:353 |
| >SNP8NRG153102_allelePos=201 total len = 401 SNP=Y chr8 | SEQ ID NO:354 |
| >SNP8NRG153109_allelePos=201 total len = 401 SNP=R chr8 | SEQ ID NO:355 |
| >SNP8NRG153982_allelePos=201 total len = 401 SNP=R chr8 | SEQ ID NO:356 |
| >SNP8NRG155677_allelePos=201 total len = 401 SNP=R chr8 | SEQ ID NO:357 |
| >SNP8NRG162185_allelePos=201 total len = 401 SNP=R chr8 | SEQ ID NO:358 |
| >SNP8NRG163442_allelePos=201 total len = 401 SNP=R chr8 | SEQ ID NO:359 |
| >SNP8NRG164247_allelePos=201 total len = 401 SNP=R chr8 | SEQ ID NO:360 |
| >SNP8NRG168136_allelePos=201 total len = 401 SNP=R chr8 | SEQ ID NO:361 |
| >SNP8NRG171197_allelePos=201 total len = 401 SNP=W chr8 | SEQ ID NO:362 |
| >SNP8NRG173048_allelePos=201 total ten = 401 SNP=Y chr8 | SEQ ID NO:363 |
| >SNP8NRG174233_allelePos=201 total len = 401 SNP=Y chr8 | SEQ ID NO:364 |
| >SNP8NRG175189_allelePos=201 total len = 401 SNP=Y chr8 | SEQ ID NO:365 |
| >SNP8NRG177393_allelePos=201 total len = 401 SNP=K chr8 | SEQ ID NO:366 |
| >SNP8NRG178779_allelePos=201 total len = 401 SNP=R chr8 | SEQ ID NO:367 |
| >SNP8NRG190498_allelePos=201 total len = 401 SNP=R chr8 | SEQ ID NO:368 |
| >SNP8NRG190825_allelePos=201 total len = 401 SNP=K chr8 | SEQ ID NO:369 |
| >SNP8NRG191481_allelePos=201 total len = 401 SNP=R chr8 | SEQ ID NO:370 |
| >SNP8NRG194616_allelePos=201 total len = 401 SNP=Y chr8 | SEQ ID NO:371 |
| >SNP8NRG196375_allelePos=201 total len = 401 SNP=R chr8 | SEQ ID NO:372 |
| >SNP8NRG201429_allelePos=201 total len = 401 SNP=R chr8 | SEQ ID NO:373 |
| >SNP8NRG201857_allelePos=201 total len = 401 SNP=R chr8 | SEQ ID NO:374 |
| >SNP8NRG227098_allelePos=201 total len = 401 SNP=Y chr8 | SEQ ID NO:375 |
| >SNP8NRG227099_allelePos=201 total len = 401 SNP=Y chr8 | SEQ ID NO:376 |
| >SNP8NRG227168_allelePos=201 total len = 401 SNP=M chr8 | SEQ ID NO:377 |
| >SNP8NRG232116_allelePos=201 total len = 401 SNP=R chr8 | SEQ ID NO:378 |
| >SNP8NRG232811_allelePos=201 total len = 401 SNP=M chr8 | SEQ ID NO:379 |
| >SNP8NRG233398_allelePos=201 total len = 401 SNP=R chr8 | SEQ ID NO:380 |
| >SNP8NRG233965_allelePos=201 total len = 401 SNP=R chr8 | SEQ ID NO:381 |
| >SNP8NRG234179_allelePos=201 total len = 401 SNP=K chr8 | SEQ ID NO:382 |
| >SNP8NRG234841_allelePos=201 total len = 401 SNP=Y chr8 | SEQ ID NO:383 |
| >SNP8NRG235627_allelePos=201 total len = 401 SNP=M chr8 | SEQ ID NO:384 |
| >SNP8NRG236029_allelePos=201 total len = 401 SNP=Y chr8 | SEQ ID NO:385 |
| >SNP8NRG236046_allelePos=201 total len = 401 SNP=Y chr8 | SEQ ID NO:386 |
| >SNP8NRG236171_allelePos=201 total len = 401 SNP=W chr8 | SEQ ID NO:387 |
| >SNP8NRG236551_allelePos=201 total len = 401 SNP=R chr8 | SEQ ID NO:388 |
| >SNP8NRG236576_allelePos=201 total len = 401 SNP=S chr8 | SEQ ID NO:389 |
| >SNP8NRG236991_allelePos=201 total len = 401 SNP=M chr8 | SEQ ID NO:390 |
| >SNP8NRG236992_allelePos=201 total len = 401 SNP=R chr8 | SEQ ID NO:391 |
| >SNP8NRG237502_allelePos=201 total len = 401 SNP=R chr8 | SEQ ID NO:392 |
| >SNP8NRG237871_allelePos=201 total len = 401 SNP=R chr8 | SEQ ID NO:393 |
| >SNP8NRG238018_allelePos=201 total len = 401 SNP=S chr8 | SEQ ID NO:394 |
| >SNP8NRG239573_allelePos=201 total len = 401 SNP=R chr8 | SEQ ID NO:395 |
| >SNP8NRG239710_allelePos=201 total len = 401 SNP=R chr8 | SEQ ID NO:396 |
| >SNP8NRG239788_allelePos=201 total len = 401 SNP=Y chr8 | SEQ ID NO:397 |
| >SNP8NRG249425_allelePos=201 total len = 401 SNP=R chr8 | SEQ ID NO:398 |
| >SNP8NRG369825_allelePos=201 total len = 401 SNP=S chr8 | SEQ ID NO:399 |
| >SNP8NRG370296_allelePos=201 total len = 401 SNP=R chr8 | SEQ ID NO:400 |
| >SNP8NRG370383_allelePos=201 total len = 401 SNP=S chr8 | SEQ ID NO:401 |
| >SNP8NRG370907_allelePos=201 total len = 401 SNP=W chr8 | SEQ ID NO:402 |
| >SNP8NRG370990_allelePos=201 total len = 401 SNP=W chr8 | SEQ ID NO:403 |
| >SNP8NRG377699_allelePos=201 total len = 401 SNP=Y chr8 | SEQ ID NO:404 |
| >SNP8NRG381914_allelePos=201 total len = 401 SNP=Y chr8 | SEQ ID NO:405 |
| >SNP8NRG383904_allelePos=201 total len = 401 SNP=W chr8 | SEQ ID NO:406 |
| >SNP8NRG383932_allelePos=201 total len = 401 SNP=Y chr8 | SEQ ID NO:407 |
| >SNP8NRG387409_allelePos=201 total len = 401 SNP=Y chr8 | SEQ ID NO:408 |
| >SNP8NRG389545_allelePos=201 total len = 401 SNP=R chr8 | SEQ ID NO:409 |
| >SNP8NRG392586_allelePos=201 total len = 401 SNP=Y chr8 | SEQ ID NO:410 |
| >SNP8NRG394624_allelePos=201 total len = 401 SNP=K chr8 | SEQ ID NO:411 |
| >SNP8NRG395330_allelePos=201 total len = 401 SNP=Y chr8 | SEQ ID NO:412 |
| >SNP8NRG396628_allelePos=201 total len = 401 SNP=R chr8 | SEQ ID NO:413 |
| >SNP8NRG398073_allelePos=201 total len = 401 SNP=K chr8 | SEQ ID NO:414 |
| >SNP8NRG398648_allelePos=201 total len = 401 SNP=Y chr8 | SEQ ID NO:415 |
| >SNP8NRG400263_allelePos=201 total len = 401 SNP=S chr8 | SEQ ID NO:416 |
| >SNP8NRG400525_allelePos=201 total len = 401 SNP=K chr8 | SEQ ID NO:417 |
| >SNP8NRG400588_allelePos=201 total len = 401 SNP=R chr8 | SEQ ID NO:418 |
| >SNP8NRG402368_allelePos=201 total len = 401 SNP=R chr8 | SEQ ID NO:419 |
| >SNP8NRG404267_allelePos=201 total len = 401 SNP=Y chr8 | SEQ ID NO:420 |
| >SNP8NRG406091_allelePos=201 total len = 401 SNP=Y chr8 | SEQ ID NO:421 |
| >SNP8NRG411328_allelePos=201 total len = 401 SNP=R chr8 | SEQ ID NO:422 |
| >SNP8NRG412001_allelePos=201 total len = 401 SNP=W chr8 | SEQ ID NO:423 |
| >SNP8NRG4L2018_allelePos=201 total len = 401 SNP=Y chr8 | SEQ ID NO:424 |
| >SNP8NRG412043_allelePos=201 total len = 401 SNP=Y chr8 | SEQ ID NO:425 |
| >SNP8NRG412100_allelePos=201 total len = 401 SNP=Y chr8 | SEQ ID NO:426 |
| >SNP8NRG422881_allelePos=201 total len = 401 SNP=S chr8 | SEQ ID NO:427 |
| >SNP8NRG423035_allelePos=201 total len = 401 SNP=R chr8 | SEQ ID NO:428 |
| >SNP8NRG423355_allelePos=201 total len = 401 SNP=W chr8 | SEQ ID NO:429 |
| >SNP8NRG429703_allelePos=201 total len = 401 SNP=R chr8 | SEQ ID NO:430 |
| >SNP8NRG429867_allelePos=201 total len = 401 SNP=Y chr8 | SEQ ID NO:431 |
| >SNP8NRG434863_allelePos=201 total len = 401 SNP=M chr8 | SEQ ID NO:432 |
| >SNP8NRG434890_allelePos=201 total len = 401 SNP=K chr8 | SEQ ID NO:433 |
| >SNP8NRG434892_allelePos=201 total len = 401 SNP=S chr8 | SEQ ID NO:434 |
| >SNP8NRG434932_allelePos=201 total len = 401 SNP=M chr8 | SEQ ID NO:435 |
| >SNP8NRG437545_allelePos=201 total len = 401 SNP=R chr8 | SEQ ID NO:436 |
| >SNP8NRG439629_allelePos=201 total len = 401 SNP=R chr8 | SEQ ID NO:437 |
| >SNP8NRG442385_allelePos=201 total len = 401 SNP=R chr8 | SEQ ID NO:438 |
| >SNP8NRG442880_allelePos=201 total len = 401 SNP=R chr8 | SEQ ID NO:439 |
| >SNP8NRG449098_allelePos=201 total len = 401 SNP=S chr8 | SEQ ID NO:440 |
| >SNP8NRG451340_allelePos=201 total len = 401 SNP=M chr8 | SEQ ID NO:441 |
| >SNP8NRG454116_allelePos=201 total len = 401 SNP=K chr8 | SEQ ID NO:442 |
| >SNP8NRG461546_allelePos=201 total len = 401 SNP=M chr8 | SEQ ID NO:443 |
| >SNP8NRG462292_allelePos=201 total len = 401 SNP=K chr8 | SEQ ID NO:444 |
| >SNP8NRG464956_allelePos=201 total len = 401 SNP=R chr8 | SEQ ID NO:445 |
| >SNP8NRG472069_allelePos=201 total len = 401 SNP=Y chr8 | SEQ ID NO:446 |
| >SNP8NRG473050_allelePos=201 total len = 401 SNP=W chr8 | SEQ ID NO:447 |
| >SNP8NRG473051_allelePos=201 total len = 401 SNP=M chr8 | SEQ ID NO:448 |
| >SNP8NRG476333_allelePos=201 total len = 401 SNP=Y chr8 | SEQ ID NO:449 |
| >SNP8NRG483011_allelePos=201 total len = 401 SNP=R chr8 | SEQ ID NO:450 |
| >SNP8NRG484046_allelePos=201 total len = 401 SNP=Y chr8 | SEQ ID NO:451 |
| >SNP8NRG484650_allelePos=201 total len = 401 SNP=S chr8 | SEQ ID NO:452 |
| >SNP8NRG485315_allelePos=201 total len = 401 SNP=M chr8 | SEQ ID NO:453 |
| >SNP8NRG485472_allelePos=201 total len = 401 SNP=R chr8 | SEQ ID NO:454 |
| >SNP8NRG488313_allelePos=201 total len = 401 SNP=Y chr8 | SEQ ID NO:455 |
| >SNP8NRG488627_allelePos=201 total len = 401 SNP=Y chr8 | SEQ ID NO:456 |
| >SNP8NRG490854_allelePos=201 total len = 401 SNP=R chr8 | SEQ ID NO:457 |
| >SNP8NRG494555_allelePos=201 total len = 401 SNP=K chr8 | SEQ ID NO:458 |
| >SNP8NRG494672_allelePos=201 total len = 401 SNP=M chr8 | SEQ ID NO:459 |
| >SNP8NRG496172_allelePos=201 total len = 401 SNP=R chr8 | SEQ ID NO:460 |
| >SNP8NRG496507_allelePos=201 total len = 401 SNP=R chr8 | SEQ ID NO:461 |
| >SNP8NRG496884_allelePos=201 total len = 401 SNP=M chr8 | SEQ ID NO:462 |
| >SNP8NRG497394_allelePos=201 total len = 401 SNP=S chr8 | SEQ ID NO:463 |
| >SNP8NRG497582_allelePos=201 total len = 401 SNP=K chr8 | SEQ ID NO:464 |
| >SNP8NRG498525_allelePos=201 total len = 401 SNP=S chr8 | SEQ ID NO:465 |
| >SNP8NRG498545_allelePos=201 total len = 401 SNP=R chr8 | SEQ ID NO:466 |
| >SNP8NRG499091_allelePos=201 total len = 401 SNP=W chr8 | SEQ ID NO:467 |
| >SNP8NRG499290_allelePos=201 total len = 401 SNP=R chr8 | SEQ ID NO:468 |
| >SNP8NRG499298_allelePos=201 total len = 401 SNP=K chr8 | SEQ ID NO:469 |
| >SNP8NRG499581_allelePos=201 total len = 401 SNP=Y chr8 | SEQ ID NO:470 |
| >SNP8NRG500578_allelePos=201 total len = 401 SNP=Y chr8 | SEQ ID NO:471 |
| >SNP8NRG500943_allelePos=201 total len = 401 SNP=W chr8 | SEQ ID NO:472 |
| >SNP8NRG503311_allelePos=201 total len = 401 SNP=R chr8 | SEQ ID NO:473 |
| >SNP8NRG504384_allelePos=201 total len = 401 SNP=K chr8 | SEQ ID NO:474 |
| >SNP8NRG504990_allelePos=201 total len = 401 SNP=M chr8 | SEQ ID NO:475 |
| >SNP8NRG506059_allelePos=201 total len = 401 SNP=R chr8 | SEQ ID NO:476 |
| >SNP8NRG507061_allelePos=201 total len = 401 SNP=M chr8 | SEQ ID NO:477 |
| >SNP8NRG509968_allelePos=201 total len = 401 SNP=W chr8 | SEQ ID NO:478 |
| >SNP8NRG512008_allelePos=201 total len = 401 SNP=R chr8 | SEQ ID NO:479 |
| >SNP8NRG512165_allelePos=201 total len = 401 SNP=R chr8 | SEQ ID NO:480 |
| >SNP8NRG512759_allelePos=201 total len = 401 SNP=R chr8 | SEQ ID NO:[471]481 |
| >SNP8NRG514033_allelePos=201 total len = 401 SNP=Y chr8 | SEQ ID NO:[472]482 |
| >SNP8NRG514826_allelePos=201 total len = 401 SNP=Y chr8 | SEQ ID NO:[473]483 |
| >SNP8NRG514880_allelePos=201 total len = 401 SNP=Y chr8 | SEQ ID NO:[474]484 |
| >SNP8NRG515070_allelePos=201 total len = 401 SNP=R chr8 | SEQ ID NO:[475]485 |
| >SNP8NRG517359_allelePos=201 total len = 401 SNP=R chr8 | SEQ ID NO:[476]486 |
| >SNP8NRG517502_allelePos=201 total len = 401 SNP=W chr8 | SEQ ID NO:[477]487 |
| >SNP8NRG517828_allelePos=201 total len = 401 SNP=Y chr8 | SEQ ID NO:[478]488 |
| >SNP8NRG518694_allelePos=201 total len = 401 SNP=Y chr8 | SEQ ID NO:[479]489 |
| >SNP8NRG518760_allelePos=201 total len = 401 SNP=W chr8 | SEQ ID NO:[480]490 |
| >SNP8NRG530128_allelePos=201 total len = 401 SNP=M chr8 | SEQ ID NO:[481]491 |
| >SNP8NRG534135_allelePos=201 total len = 401 SNP=K chr8 | SEQ ID NO:[482]492 |
| >SNP8NRG534842_allelePos=201 total len = 401 SNP=S chr8 | SEQ ID NO:[483]493 |
| >SNP8NRG536457_allelePos=201 total len = 401 SNP=Y chr8 | SEQ ID NO:[484]494 |
| >SNP8NRG536464_allelePos=201 total len = 401 SNP=R chr8 | SEQ ID NO:[485]495 |
| >SNP8NRG536524_allelePos=201 total len = 401 SNP=Y chr8 | SEQ ID NO:[486]496 |
| >SNP8NRG536710_allelePos=201 total len = 401 SNP=R chr8 | SEQ ID NO:[487]497 |
| >SNP8NRG536715_allelePos=201 total len = 401 SNP=R chr8 | SEQ ID NO:[488]498 |
| >SNP8NRG536847_allelePos=201 total len = 401 SNP=R chr8 | SEQ ID NO:[48919 499 |
| >SNP8NRG536874_allelePos=201 total len = 401 SNP=R chr8 | SEQ ID NO:[490]500 |
| >SNP8NRG537100_allelePos=201 total len = 401 SNP=R chr8 | SEQ ID NO:[491]501 |
| >SNP8NRG537158_allelePos=201 total len = 401 SNP=R chr8 | SEQ ID NO:[492]502 |
| >SNP8NRG537813_allelePos=201 total len = 401 SNP=Y chr8 | SEQ ID NO:[493]503 |
| >SNP8NRG537869_allelePos=201 total len = 401 SNP=R chr8 | SEQ ID NO:[494]504 |
| >SNP8NRG538785_allelePos=201 total len = 401 SNP=K chr8 | SEQ ID NO:[495]505 |
| >SNP8NRG538824_allelePos=201 total len = 401 SNP=W chr8 | SEQ ID NO:[496]506 |
| >SNP8NRG538855_allelePos=201 total len = 401 SNP=Y chr8 | SEQ ID NO:[49719 507 |
| >SNP8NRG539044_allelePos=201 total len = 401 SNP=Y chr8 | SEQ ID NO:[498]508 |
| >SNP8NRG539419_allelePos=201 total len = 401 SNP=R chr8 | SEQ ID NO:[499]509 |
| >SNP8NRG539996_allelePos=201 total len = 401 SNP=R chr8 | SEQ ID NO:[500]510 |
| >SNP8NRG540481_allelePos=201 total len = 401 SNP=Y chr8 | SEQ ID NO:[501]511 |
| >SNP8NRG540881_allelePos=201 total len = 401 SNP=R chr8 | SEQ ID NO:[502]512 |
| >SNP8NRG542076_allelePos=201 total len = 401 SNP=R chr8 | SEQ ID NO:[503]513 |
| >SNP8NRG542308_allelePos=201 total len = 401 SNP=Y chr8 | SEQ ID NO:[504]514 |
| >SNP8NRG543443_allelePos=201 total len = 401 SNP=R chr8 | SEQ ID NO:[505]515 |
| >SNP8NRG543893_aIlelePos=201 total len = 401 SNP=Y chr8 | SEQ ID NO:[506]516 |
| >SNP8NRG544125_allelePos=201 total len = 401 SNP=R chr8 | SEQ ID NO:[507]517 |
| >SNP8NRG545032_allelePos=201 total len = 401 SNP=M chr8 | SEQ ID NO:[508]518 |
| >SNP8NRG546398_allelePos=201 total len = 401 SNP=R chr8 | SEQ ID NO:[509]519 |
| >SNP8NRG546759_allelePos=201 total len = 401 SNP=R chr8 | SEQ ID NO:[510]520 |
| >SNP8NRG547077_allelePos=201 total len = 401 SNP=S chr8 | SEQ ID NO:[511]521 |
| >SNP8NRG547488_alleIePos=201 total len = 401 SNP=Y chr8 | SEQ ID NO:[512]522 |
| >SNP8NRG549025_allelePos=201 total len = 401 SNP=K chr8 | SEQ ID NO:[513]523 |
| >SNP8NRG549845_allelePos=201 total len = 401 SNP=R chr8 | SEQ ID N0:[514]524 |
| >SNP8NRG550884_allelePos=201 total len = 401 SNP=R chr8 | SEQ ID NO:[515]525 |
| >SNP8NRG551624_allelePos=201 total len = 401 SNP=R chr8 | SEQ ID NO:[516]526 |
| >SNP8NRG552970_allelePos=201 total len = 401 SNP=W chr8 | SEQ ID NO:[517]527 |
| >SNP8NRG552995_aIlelePos=201 total len = 401 SNP=R chr8 | SEQ ID NO:[518]528 |
| >SNP8NRG555662_allelePos=201 total len = 401 SNP=Y chr8 | SEQ ID NO:[519]529 |
| >SNP8NRG556028_allelePos=201 total len = 401 SNP=R chr8 | SEQ ID NO:[520]530 |
| >SNP8NRG556277_allelePos=201 total len = 401 SNP=R chr8 | SEQ ID NO:[521]531 |
| >SNP8NRG556576_allelePos=201 total len = 401 SNP=R chr8 | SEQ ID NO:[522]532 |
| >SNP8NRG557028_allelePos=201 total len = 401 SNP=Y chr8 | SEQ ID NO:[523]533 |
| >SNP8NRG566570_allelePos=201 total len = 401 SNP=M chr8 | SEQ ID NO:[524]534 |
| >SNP8NRG569281_allelePos=201 total len = 401 SNP=Y chr8 | SEQ ID NO:[525]535 |
| >SNP8NRG570088_allelePos=201 total len = 401 SNP=Y chr8 | SEQ ID NO:[526]536 |
| >SNP8NRG570754_allelePos=201 total len = 401 SNP=Y chr8 | SEQ ID NO:[527]537 |
| >SNP8NRG570925_allelePos=201 total len = 401 SNP=R chr8 | SEQ ID NO:[528]538 |
| >SNP8NRG572718_allelePos=201 total len = 401 SNP=Y chr8 | SEQ ID NO:[529]539 |
| >SNP8NRG573656_allelePos=201 total len = 401 SNP=R chr8 | SEQ ID NO:[530]540 |
| >SNP8NRG577185_allelePos=201 total len = 401 SNP=W chr8 | SEQ ID NO:[531]541 |
| >SNP8NRG579492_allelePos=201 total len = 401 SNP=Y chr8 | SEQ ID NO:[532]542 |
| >SNP8NRG582975_allelePos=201 total len = 401 SNP=Y chr8 | SEQ ID NO:[533]543 |
| >SNP8NRG589273_allelePos=201 total len = 401 SNP=W chr8 | SEQ ID NO:[534]544 |
| >SNP8NRG590073_allelePos=201 total len = 401 SNP=K chr8 | SEQ ID NO:[535]545 |
| >SNP8NRG593971_allelePos=201 total len = 401 SNP=R chr8 | SEQ ID NO:[536]546 |
| >SNP8NRG594222_allelePos=201 total len = 401 SNP=M chr8 | SEQ ID NO:[537]547 |
| >SNP8NRG594969_al1elePos=201 total len = 401 SNP=Y chr8 | SEQ ID NO:[538]548 |
| >SNP8NRG598261_allelePos=201 total len = 401 SNP=M chr8 | SEQ ID NO:[539]549 |
| >SNP8NRG600941_allelePos=201 total len = 401 SNP=Y chr8 | SEQ ID NO:[540]550 |
| >SNP8NRG601424_allelePos=201 total len = 401 SNP=Y chr8 | SEQ ID NO:[541]551 |
| >SNP8NRG602056_allelePos=201 total len = 401 SNP=W chr8 | SEQ ID NO:[542]552 |
| >SNP8NRG603048_alleIePos=201 total len = 401 SNP=Y chr8 | SEQ ID NO:[543]553 |
| >SNP8NRG605839_allelePos=201 total len = 401 SNP=Y chr8 | SEQ ID NO:[544]554 |
| >SNP8NRG608117_allelePos=201 total len = 401 SNP=Y chr8 | SEQ ID NO:[545]555 |
| >SNP8NRG616296_allelePos=201 total len = 401 SNP=W chr8 | SEQ ID NO:[546]556 |
| >SNP8NRG620232_allelePos=201 total len = 401 SNP=Y chr8 | SEQ ID NO:[547]557 |
| >SNP8NRG620810_allelePos=201 total len = 401 SNP=K chr8 | SEQ ID NO:[548]558 |
| >SNP8NRG655013_allelePos=201 total len = 401 SNP=Y chr8 | SEQ ID NO:[549]559 |
| >SNP8NRG677216_allelePos=201 total len = 401 SNP=W chr8 | SEQ ID NO:[550]560 |
| >SNP8NRG677458_allelePos=201 total len = 401 SNP=R chr8 | SEQ ID NO:[551]561 |
| >SNP8NRG677746_allelePos=201 total len = 401 SNP=R chr8 | SEQ ID NO:562 |
| >SNP8NRG678032_allelePos=201 total len = 401 SNP=R chr8 | SEQ ID NO:563 |
| >SNP8NRG678127_allelePos=201 total len = 401 SNP=Y chr8 | SEQ ID NO:564 |
| >SNP8NRG678862_allelePos=201 total len = 401 SNP=Y chr8 | SEQ ID NO:565 |
| >SNP8NRG678954_allelePos=201 total len = 401 SNP=R chr8 | SEQ ID NO:566 |
| >SNP8NRG679070_allelePos=201 total len = 401 SNP=S chr8 | SEQ ID NO:567 |
| >SNP8NRG679557_allelePos=201 total len = 401 SNP=R chr8 | SEQ ID NO:568 |
| >SNP8NRG679688_allelePos=201 total len = 401 SNP=Y chr8 | SEQ ID NO:569 |
| >SNP8NRG679842_allelePos=201 total len = 401 SNP=M chr8 | SEQ ID NO:570 |
| >SNP8NRG680471_allelePos=201 total len = 401 SNP=S chr8 | SEQ ID NO:571 |
| >SNP8NRG680652_allelePos=201 total len = 401 SNP=S chr8 | SEQ ID NO:572 |
| >SNP8NRG680660_allelePos=201 total len = 401 SNP=Y chr8 | SEQ ID NO:573 |
| >SNP8NRG681146_allelePos=201 total len = 401 SNP=Y chr8 | SEQ ID NO:574 |
| >SNP8NRG681199_allelePos=201 total len = 401 SNP=W chr8 | SEQ ID NO:575 |
| >SNP8NRG681415_allelePos=201 total len = 401 SNP=R chr8 | SEQ ID NO:576 |
| >SNP8NRG681417_allelePos=201 total len = 401 SNP=R chr8 | SEQ ID NO:577 |
| >SNP8NRG681505_allelePos=201 total len = 401 SNP=R chr8 | SEQ ID NO:578 |
| >SNP8NRG682121_allelePos=201 total len = 401 SNP=Y chr8 | SEQ ID NO:579 |
| >SNP8NRG682288_allelePos=201 total len = 401 SNP=M chr8 | SEQ ID NO:580 |
| >SNP8NRG682494_allelePos=201 total len = 401 SNP=K chr8 | SEQ ID NO:581 |
| >SNP8NRG682578_allelePos=201 total len = 401 SNP=R chr8 | SEQ ID NO:582 |
| >SNP8NRG682743_allelePos=201 total len = 401 SNP=Y chr8 | SEQ ID NO:583 |
| >SNP8NRG683348_allelePos=201 total len = 401 SNP=R chr8 | SEQ ID NO:584 |
| >SNP8NRG683504_allelePos=201 total len = 401 SNP=R chr8 | SEQ ID NO:585 |
| >SNP8NRG683993_allelePos=201 total len = 401 SNP=K chr8 | SEQ ID NO:586 |
| >SNP8NRG684423_allelePos=201 total len = 401 SNP=R chr8 | SEQ ID NO:587 |
| >SNP8NRG684806_allelePos=201 total len = 401 SNP=Y chr8 | SEQ ID NO:588 |
| >SNP8NRG684942_allelePos=201 total len = 401 SNP=R chr8 | SEQ ID NO:589 |
| >SNP8NRG684966_allelePos=201 total len = 401 SNP=R chr8 | SEQ ID NO:590 |
| >SNP8NRG685267_allelePos=201 total len = 401 SNP=R chr8 | SEQ ID NO:591 |
| >SNP8NRG685344_allelePos=201 total len = 401 SNP=R chr8 | SEQ ID NO:592 |
| >SNP8NRG685448_allelePos=201 total len = 401 SNP=R chr8 | SEQ ID NO:593 |
| >SNP8NRG685616_allelePos=201 total len = 401 SNP=R chr8 | SEQ ID NO:594 |
| >SNP8NRG686138_allelePos=201 total len = 401 SNP=Y chr8 | SEQ ID NO:595 |
| >SNP8NRG686236_allelePos=201 total len = 401 SNP=S chr8 | SEQ ID NO:596 |
| >SNP8NRG686480_allelePos=201 total len = 401 SNP=R chr8 | SEQ ID NO:597 |
| >SNP8NRG687371_allelePos=201 total len = 401 SNP=Y chr8 | SEQ ID NO:598 |
| >SNP8NRG688378_allelePos=201 total len = 401 SNP=K chr8 | SEQ ID NO:599 |
| >SNP8NRG689067_allelePos=201 total len = 401 SNP=M chr8 | SEQ ID NO:600 |
| >SNP8NRG689479_allelePos=201 total len = 401 SNP=M chr8 | SEQ ID NO:601 |
| >SNP8NRG691268_allelePos=201 total len = 401 SNP=K chr8 | SEQ ID NO:602 |
| >SNP8NRG691470_allelePos=201 total len = 401 SNP=Y chr8 | SEQ ID NO:603 |
| >SNP8NRG691967_allelePos=201 total len = 401 SNP=R chr8 | SEQ ID NO:604 |
| >SNP8NRG692205_allelePos=201 total len = 401 SNP=S chr8 | SEQ ID NO:605 |
| >SNP8NRG695197_allelePos=201 total len = 401 SNP=Y chr8 | SEQ ID NO:606 |
| >SNP8NRG695344_allelePos=201 total len = 401 SNP=Y chr8 | SEQ ID NO:607 |
| >SNP8NRG695721_allelePos=201 total len = 401 SNP=M chr8 | SEQ ID NO:608 |
| >SNP8NRG696882_allelePos=201 total len = 401 SNP=K chr8 | SEQ ID NO:609 |
| >SNP8NRG698221_allelePos=201 total len = 401 SNP=R chr8 | SEQ ID NO:610 |
| >SNP8NRG698840_allelePos=201 total len = 401 SNP=R chr8 | SEQ ID NO:611 |
| >SNP8NRG699486_allelePos=201 total len = 401 SNP=W chr8 | SEQ ID NO:612 |
| >SNP8NRG700187_allelePos=201 total len = 401 SNP=R chr8 | SEQ ID NO:613 |
| >SNP8NRG702591_allelePos=201 total len = 401 SNP=R chr8 | SEQ ID NO:614 |
| >SNP8NRG704565_allelePos=201 total len = 401 SNP=K chr8 | SEQ ID NO:615 |
| >SNP8NRG704566_allelePos=201 total len = 401 SNP=K chr8 | SEQ ID NO:616 |
| >SNP8NRG705986_allelePos=201 total len = 401 SNP=R chr8 | SEQ ID NO:617 |
| >SNP8NRG706716_allelePos=201 total len = 401 SNP=S chr8 | SEQ ID NO:618 |
| >SNP8NRG706760_allelePos=201 total len = 401 SNP=W chr8 | SEQ ID NO:619 |
| >SNP8NRG706787_allelePos=201 total len = 401 SNP=Y chr8 | SEQ ID NO:620 |
| >SNP8NRG707025_allelePos=201 total len = 401 SNP=Y chr8 | SEQ ID NO:621 |
| >SNP8NRG707181_allelePos=201 total len = 401 SNP=R chr8 | SEQ ID NO:622 |
| >SNP8NRG707385_allelePos=201 total len = 401 SNP=Y chr8 | SEQ ID NO:623 |
| >SNP8NRG707818_allelePos=201 total len = 401 SNP=M chr8 | SEQ ID NO:624 |
| >SNP8NRG708196_allelePos=201 total len = 401 SNP=Y chr8 | SEQ ID NO:625 |
| >SNP8NRG709613_allelePos=201 total len = 401 SNP=Y chr8 | SEQ ID NO:626 |
| >SNP8NRG711016_allelePos=201 total len = 401 SNP=M chr8 | SEQ ID NO:627 |
| >SNP8NRG711547_allelePos=201 total len = 401 SNP=Y chr8 | SEQ ID NO:628 |
| >SNP8NRG711631_allelePos=201 total len = 401 SNP=R chr8 | SEQ ID NO:629 |
| >SNP8NRG711906_allelePos=201 total len = 401 SNP=Y chr8 | SEQ ID NO:630 |
| >SNP8NRG712006_allelePos=201 total len = 401 SNP=Y chr8 | SEQ ID NO:631 |
| >SNP8NRG712008_allelePos=201 total len = 401 SNP=Y chr8 | SEQ ID NO:632 |
| >SNP8NRG712019_allelePos=201 total len = 401 SNP=M chr8 | SEQ ID NO:633 |
| >SNP8NRG712021_allelePos=201 total len = 401 SNP=M chr8 | SEQ ID NO:634 |
| >SNP8NRG712197_allelePos=201 total len = 401 SNP=R chr8 | SEQ ID NO:635 |
| >SNP8NRG713338_allelePos=201 total len = 401 SNP=R chr8 | SEQ ID NO:636 |
| >SNP8NRG714098_allelePos=201 total len = 401 SNP=K chr8 | SEQ ID NO:637 |
| >SNP8NRG721644_allelePos=201 total len = 401 SNP=R chr8 | SEQ ID NO:638 |
| >SNP8NRG722161_allelePos=201 total len = 401 SNP=M chr8 | SEQ ID NO:639 |
| >SNP8NRG732174_allelePos=201 total len = 401 SNP=S chr8 | SEQ ID NO:640 |
| >SNP8NRG732649_allelePos=201 total len = 401 SNP=S chr8 | SEQ ID NO:641 |
| >SNP8NRG738227_allelePos=201 total len = 401 SNP=R chr8 | SEQ ID NO:642 |
| >SNP8NRG746622_allelePos=201 total len = 401 SNP=W chr8 | SEQ ID NO:643 |
| >SNP8NRG759168_allelePos=201 total len = 401 SNP=R chr8 | SEQ ID NO:644 |
| >SNP8NRG759175_allelePos=201 total len = 401 SNP=W chr8 | SEQ ID NO:645 |
| >SNP8NRG759193_allelePos=201 total len = 401 SNP=R chr8 | SEQ ID NO:646 |
| >SNP8NRG759194_allelePos=201 total len = 401 SNP=K chr8 | SEQ ID NO:647 |
| >SNP8NRG781458_allelePos=201 total len = 401 SNP=Y chr8 | SEQ ID NO:648 |
| >SNP8NRG781466_allelePos=201 total len = 401 SNP=S chr8 | SEQ ID NO:649 |
| >SNP8NRG781469_allelePos=201 total len = 401 SNP=M cbr8 | SEQ ID NO:650 |
| >SNP8NRG781478_allelePos=201 total len = 401 SNP=M chr8 | SEQ ID NO:651 |
| >SNP8NRG781571_allelePos=201 total len = 401 SNP=M chr8 | SEQ ID NO:652 |
| >SNP8NRG783432_allelePos=201 total len = 401 SNP=R chr8 | SEQ ID NO:653 |
| >SNP8NRG801900_allelePos=201 total len = 401 SNP=Y chr8 | SEQ ID NO:654 |
| >SNP8NRG801945_allelePos=201 total len = 401 SNP=W chr8 | SEQ ID NO:655 |
| >SNP8NRG801972_allelePos=201 total len = 401 SNP=R chr8 | SEQ ID NO:656 |
| >SNP8NRG802948_allelePos=201 total len = 401 SNP=R chr8 | SEQ ID NO:657 |
| >SNP8NRG803902_allelePos=201 total len = 401 SNP=K chr8 | SEQ ID NO:658 |
| >SNP8NRG804933_allelePos=201 total len = 401 SNP=K chr8 | SEQ ID NO:659 |
| >SNP8NRG808369_allelePos=201 total len = 401 SNP=K chr8 | SEQ ID NO:660 |
| >SNP8NRG810103_allelePos=201 total len = 401 SNP=R chr8 | SEQ ID NO:661 |
| >SNP8NRG811374_allelePos=201 total len = 401 SNP=K chr8 | SEQ ID NO:662 |
| >SNP8NRG812451_allelePos=201 total len = 401 SNP=W chr8 | SEQ ID NO:663 |
| >SNP8NRG812814_allelePos=201 total len = 401 SNP=K chr8 | SEQ ID NO:664 |
| >SNP8NRG813632_allelePos=201 total len = 401 SNP=R chr8 | SEQ ID NO:665 |
| >SNP8NRG815395_allelePos=201 total len = 401 SNP=Y chr8 | SEQ ID NO:666 |
| >SNP8NRG815510_allelePos=201 total len = 401 SNP=R chr8 | SEQ ID NO:667 |
| >SNP8NRG815632_allelePos=201 total len = 401 SNP=Y chr8 | SEQ ID NO:668 |
| >SNP8NRG816259_allelePos=201 total len = 401 SNP=Y chr8 | SEQ ID NO:669 |
| >SNP8NRG817230_allelePos=201 total len = 401 SNP=R chr8 | SEQ ID NO:670 |
| >SNP8NRG817257_allelePos=201 total len = 401 SNP=Y chr8 | SEQ ID NO:671 |
| >SNP8NRG817495_allelePos=201 total len = 401 SNP=R chr8 | SEQ ID NO:672 |
| >SNP8NRG817897_allelePos=201 total len = 401 SNP=R chr8 | SEQ ID NO:673 |
| >SNP8NRG820736_allelePos=201 total len = 401 SNP=R chr8 | SEQ ID NO:674 |
| >SNP8NRG821031_allelePos=201 total len = 401 SNP=K chr8 | SEQ ID NO:675 |
| >SNP8NRG821032_allelePos=201 total len = 401 SNP=R chr8 | SEQ ID NO:676 |
| >SNP8NRG821185_allelePos=201 total len = 401 SNP=W chr8 | SEQ ID NO:677 |
| >SNP8NRG821566_allelePos=201 total len = 401 SNP=R chr8 | SEQ ID NO:678 |
| >SNP8NRG822470_allelePos=201 total len = 401 SNP=M chr8 | SEQ ID NO:679 |
| >SNP8NRG823186_allelePos=201 total len = 401 SNP=Y chr8 | SEQ ID NO:680 |
| >SNP8NRG823501_allelePos=201 total len = 401 SNP=Y chr8 | SEQ ID NO:681 |
| >SNP8NRG823799_aIlelePos=201 total len = 401 SNP=R chr8 | SEQ ID NO:682 |
| >SNP8NRG823932_allelePos=201 total len = 401 SNP=R chr8 | SEQ ID NO:683 |
| >SNP8NRG824172_allelePos=201 total len = 401 SNP=Y chr8 | SEQ ID NO:684 |
| >SNP8NRG824591_allelePos=201 total len = 401 SNP=R chr8 | SEQ ID NO:685 |
| >SNP8NRG826307_allelePos=201 total len = 401 SNP=K chr8 | SEQ ID NO:686 |
| >SNP8NRG826553_allelePos=201 total len = 401 SNP=Y chr8 | SEQ ID NO:687 |
| >SNP8NRG827004_allelePos=201 total len = 401 SNP=Y chr8 | SEQ ID NO:688 |
| >SNP8NRG827707_allelePos=201 total len = 401 SNP=K chr8 | SEQ ID NO:689 |
| >SNP8NRG830857_allelePos=201 total len = 401 SNP=W chr8 | SEQ ID NO:690 |
| >SNP8NRG831517_allelePos=201 total len = 401 SNP=Y chr8 | SEQ ID NO:691 |
| >SNP8NRG831598_allelePos=201 total len = 401 SNP=Y chr8 | SEQ ID NO:692 |
| >SNP8NRG831694_allelePos=201 total len = 401 SNP=Y chr8 | SEQ ID NO:693 |
| >SNP8NRG832144_allelePos=201 total len = 401 SNP=K chr8 | SEQ ID NO:694 |
| >SNP8NRG832522_allelePos=201 total len = 401 SNP=R chr8 | SEQ ID NO:695 |
| >SNP8NRG832544_allelePos=201 total len = 401 SNP=Y chr8 | SEQ ID NO:696 |
| >SNP8NRG832623_allelePos=201 total len = 401 SNP=Y chr8 | SEQ ID NO:697 |
| >SNP8NRG832958_allelePos=201 total len = 401 SNP=Y chr8 | SEQ ID NO:698 |
| >SNP8NRG833050_allelePos=201 total len = 401 SNP=W chr8 | SEQ ID NO:699 |
| >SNP8NRG833249_allelePos=201 total len = 401 SNP=K chr8 | SEQ ID NO:700 |
| >SNP8NRG833254_allelePos=201 total len = 401 SNP=Y chr8 | SEQ ID NO:701 |
| >SNP8NRG835058_allelePos=201 total len = 401 SNP=Y chr8 | SEQ ID NO:702 |
| >SNP8NRG835833_allelePos=201 total len = 401 SNP=R chr8 | SEQ ID NO:703 |
| >SNP8NRG836507_allelePos=201 total len = 401 SNP=R chr8 | SEQ ID NO:704 |
| >SNP8NRG837119_allelePos=201 total len = 401 SNP=Y chr8 | SEQ ID NO:705 |
| >SNP8NRG837766_allelePos=201 total len = 401 SNP=R chr8 | SEQ ID NO:706 |
| >SNP8NRG838113_allelePos=201 total len = 401 SNP=K chr8 | SEQ ID NO:707 |
| >SNP8NRG838835_allelePos=201 total len = 401 SNP=R chr8 | SEQ ID NO:708 |
| >SNP8NRG839935_allelePos=201 total len = 401 SNP=R chr8 | SEQ ID NO:709 |
| >SNP8NRG840940_allelePos=201 total len = 401 SNP=Y chr8 | SEQ ID NO:710 |
| >SNP8NRG841505_allelePos=201 total len = 401 SNP=Y chr8 | SEQ ID NO:711 |
| >SNP8NRG842075_allelePos=201 total len = 401 SNP=R chr8 | SEQ ID NO:712 |
| >SNP8NRG842631_allelePos=201 total len = 401 SNP=R chr8 | SEQ ID NO:713 |
| >SNP8NRG843040_allelePos=201 total len = 401 SNP=R chr8 | SEQ ID NO:714 |
| >SNP8NRG844427_allelePos=201 total len = 401 SNP=K chr8 | SEQ ID NO:715 |
| >SNP8NRG844589_allelePos=20l total len = 401 SNP=M chr8 | SEQ ID NO:716 |
| >SNP8NRG844815_allelePos=201 total len = 401 SNP=M chr8 | SEQ ID NO:717 |
| >SNP8NRG845435_allelePos=201 total len = 401 SNP=R chr8 | SEQ ID NO:718 |
| >SNP8NRG845506_allelePos=201 total len = 401 SNP=M chr8 | SEQ ID NO:719 |
| >SNP8NRG845781_allelePos=201 total len = 401 SNP=K chr8 | SEQ ID NO:720 |
| >SNP8NRG845818_allelePos=201 total len = 401 SNP=W chr8 | SEQ ID NO:721 |
| >SNP8NRG845981_allelePos=201 total len = 401 SNP=R chr8 | SEQ ID NO:722 |
| >SNP8NRG846192_allelePos=201 total len = 401 SNP=R chr8 | SEQ ID NO:723 |
| >SNP8NRG846323_allelePos=201 total len = 401 SNP=W chr8 | SEQ ID NO:724 |
| >SNP8NRG846553_allelePos=201 total len = 401 SNP=Y chr8 | SEQ ID NO:725 |
| >SNP8NRG846846_allelePos=201 total len = 401 SNP=M chr8 | SEQ ID NO:726 |
| >SNP8NRG846876_allelePos=201 total len = 401 SNP=S chr8 | SEQ ID NO:727 |
| >SNP8NRG846929_allelePos=201 total len = 401 SNP=W chr8 | SEQ ID NO:728 |
| >SNP8NRG847327_allelePos=201 total len = 401 SNP=S chr8 | SEQ ID NO:729 |
| >SNP8NRG847992_aIlelePos=201 total len = 401 SNP=M chr8 | SEQ ID NO:730 |
| >SNP8NRG848193_allelePos=201 total len = 401 SNP=Y chr8 | SEQ ID NO:731 |
| >SNP8NRG848437_allelePos=201 total len = 401 SNP=S chr8 | SEQ ID NO:732 |
| >SNP8NRG848956_allelePos=201 total len = 401 SNP=R chr8 | SEQ ID NO:733 |
| >SNP8NRG849944_allelePos=201 total len = 401 SNP=R chr8 | SEQ ID NO:734 |
| >SNP8NRG850420_allelePos=201 total len = 401 SNP=R chr8 | SEQ ID NO:735 |
| >SNP8NRG850692_allelePos=201 total len = 401 SNP=K chr8 | SEQ ID NO:736 |
| >SNP8NRG850853_allelePos=201 total len = 401 SNP=R chr8 | SEQ ID NO:737 |
| >SNP8NRG850953_allelePos=201 total len = 401 SNP=R chr8 | SEQ ID NO:738 |
| >SNP8NRG850964_allelePos=201 total len = 401 SNP=R chr8 | SEQ ID NO:739 |
| >SNP8NRG851181_allelePos=201 total len = 401 SNP=R chr8 | SEQ ID NO:740 |
| >SNP8NRG851217_allelePos=201 total len = 401 SNP=K chr8 | SEQ ID NO:741 |
| >SNP8NRG851509_allelePos=20l total len = 401 SNP=R chr8 | SEQ ID NO:742 |
| >SNP8NRG852107_allelePos=201 total len = 401 SNP=K chr8 | SEQ ID NO:743 |
| >SNP8NRG852368_allelePos=201 total len = 401 SNP=W chr8 | SEQ ID NO:744 |
| >SNP8NRG852785_allelePos=201 total len = 401 SNP=K chr8 | SEQ ID NO:745 |
| >SNP8NRG852855_aIIelePos=201 total len = 401 SNP=Y chr8 | SEQ ID NO:746 |
| >SNP8NRG853938_allelePos=201 total len = 401 SNP=K chr8 | SEQ ID NO:747 |
| >SNP8NRG854211_allelePos=201 total len = 401 SNP=R chr8 | SEQ ID NO:748 |
| >SNP8NRG854225_allelePos=201 total len = 401 SNP=R chr8 | SEQ ID NO:749 |
| >SNP8NRG854274_allelePos=201 total len = 401 SNP=W chr8 | SEQ ID NO:750 |
| >SNP8NRG854889_allelePos=201 total len = 401 SNP=R chr8 | SEQ ID NO:751 |
| >SNP8NRG855050_allelePos=201 total len = 401 SNP=R chr8 | SEQ ID NO:752 |
| >SNP8NRG855122_allelePos=201 total len = 401 SNP=Y chr8 | SEQ ID NO:753 |
| >SNP8NRG855659_allelePos=201 total len = 401 SNP=R chr8 | SEQ ID NO:754 |
| >SNP8NRG855946_allelePos=201 total len = 401 SNP=W chr8 | SEQ ID NO:755 |
| >SNP8NRG856254_allelePos=201 total len = 401 SNP=W chr8 | SEQ ID NO:756 |
| >SNP8NRG856374_allelePos=201 total len = 401 SNP=R chr8 | SEQ ID NO:757 |
| >SNP8NRG857434_allelePos=201 total len = 401 SNP=Y chr8 | SEQ ID NO:758 |
| >SNP8NRG857668_allelePos=201 total len = 401 SNP=M chr8 | SEQ ID NO:759 |
| >SNP8NRG857708_allelePos=201 total len = 401 SNP=R chr8 | SEQ ID NO:760 |
| >SNP8NRG858008_allelePos=201 total len = 401 SNP=W chr8 | SEQ ID NO:761 |
| >SNP8NRG858045_alleIePos=201 total len = 401 SNP=K chr8 | SEQ ID NO:762 |
| >SNP8NRG858368_allelePos=201 total len = 401 SNP=R chr8 | SEQ ID NO:763 |
| >SNP8NRG858826_allelePos=201 total len = 401 SNP=R chr8 | SEQ ID NO:764 |
| >SNP8NRG858861_allelePos=201 total len = 401 SNP=S chr8 | SEQ ID NO:765 |
| >SNP8NRG859550_allelePos=201 total len = 401 SNP=Y chr8 | SEQ ID NO:766 |
| >SNP8NRG859612_allelePos=201 total len = 401 SNP=W chr8 | SEQ ID NO:767 |
| >SNP8NRG859720_allelePos=201 total len = 401 SNP=Y chr8 | SEQ ID NO:768 |
| >SNP8NRG859860_allelePos=201 total len = 401 SNP=Y chr8 | SEQ ID NO:769 |
| >SNP8NRG860269_allelePos=201 total len = 401 SNP=W chr8 | SEQ ID NO:770 |
| >SNP8NRG860299_allelePos=201 total len = 401 SNP=K chr8 | SEQ ID NO:771 |
| >SNP8NRG861172_allelePos=201 total len = 401 SNP=M chr8 | SEQ ID NO:772 |
| >SNP8NRG861223_allelePos=201 total len = 401 SNP=R chr8 | SEQ ID NO:773 |
| >SNP8NRG862179_allelePos=201 total len = 401 SNP=Y chr8 | SEQ ID NO:774 |
| >SNP8NRG862707_allelePos=201 total len = 401 SNP=R chr8 | SEQ ID NO:775 |
| >SNP8NRG863129_allelePos=201 total len = 401 SNP=Y chr8 | SEQ ID NO:776 |
| >SNP8NRG863140_allelePos=201 total len = 401 SNP=M chr8 | SEQ ID NO:777 |
| >SNP8NRG866626_allelePos=201 total len = 401 SNP=Y chr8 | SEQ ID NO:778 |
| >SNP8NRG871644_allelePos=201 total len = 401 SNP=Y chr8 | SEQ ID NO:779 |
| >SNP8NRG872765_allelePos=201 total len = 401 SNP=R chr8 | SEQ ID NO:780 |
| >SNP8NRG879080_allelePos=201 total len = 401 SNP=R chr8 | SEQ ID NO:781 |
| >SNP8NRG880333_allelePos=201 total len = 401 SNP=R chr8 | SEQ ID NO:782 |
| >SNP8NRG880710_allelePos=201 total len = 401 SNP=S chr8 | SEQ ID NO:783 |
| >SNP8NRG881706_allelePos=201 total len = 401 SNP=W chr8 | SEQ ID NO:784 |
| >SNP8NRG881762_allelePos=201 total len = 401 SNP=Y chr8 | SEQ ID NO:785 |
| >SNP8NRG881912_allelePos=201 total len = 401 SNP=Y chr8 | SEQ ID NO:786 |
| >SNP8NRG882059_allelePos=201 total len = 401 SNP=Y chr8 | SEQ ID NO:787 |
| >SNP8NRG886225_allelePos=201 total len = 401 SNP=R chr8 | SEQ ID NO:788 |
| >SNP8NRG886728_allelePos=201 total len = 401 SNP=R chr8 | SEQ ID NO:789 |
| >SNP8NRG887098_allelePos=201 total len = 401 SNP=W chr8 | SEQ ID NO:790 |
| >SNP8NRG888211_allelePos=201 total len = 401 SNP=R chr8 | SEQ ID NO:791 |
| >SNP8NRG888516_allelePos=201 total len = 401 SNP=Y chr8 | SEQ ID NO:792 |
| >SNP8NRG888859_allelePos=201 total len = 401 SNP=K chr8 | SEQ ID NO:793 |
| >SNP8NRG888984_allelePos=201 total len = 401 SNP=R chr8 | SEQ ID NO:794 |
| >SNP8NRG889499_allelePos=201 total len = 401 SNP=M chr8 | SEQ ID NO:795 |
| >SNP8NRG889503_allelePos=201 total len = 401 SNP=M chr8 | SEQ ID NO:796 |
| >SNP8NRG889527_allelePos=201 total len = 401 SNP=M chr8 | SEQ ID NO:797 |
| >SNP8NRG889532_allelePos=201 total len = 401 SNP=Y chr8 | SEQ ID NO:798 |
| >SNP8NRG889600_aIlelePos=201 total len = 401 SNP=S chr8 | SEQ ID NO:799 |
| >SNP8NRG889616_allelePos=201 total len = 401 SNP=W chr8 | SEQ ID NO:800 |
| >SNP8NRG890254_allelePos=201 total len = 401 SNP=S chr8 | SEQ ID NO:801 |
| >SNP8NRG890931_allelePos=201 total len = 401 SNP=R chr8 | SEQ ID NO:802 |
| >SNP8NRG895473_allelePos=201 total len = 401 SNP=K chr8 | SEQ ID NO:803 |
| >SNP8NRG896291_allelePos=201 total len = 401 SNP=R chr8 | SEQ ID NO:804 |
| >SNP8NRG897559_allelePos=201 total len = 401 SNP=Y chr8 | SEQ ID NO:805 |
| >SNP8NRG898013_allelePos=201 total len = 401 SNP=Y chr8 | SEQ ID NO:806 |
| >SNP8NRG898791_allelePos=201 total len = 401 SNP=Y chr8 | SEQ ID NO:807 |
| >SNP8NRG900832_allelePos=201 total len = 401 SNP=R chr8 | SEQ ID NO:808 |
| >SNP8NRG901339_allelePos=201 total len = 401 SNP=R chr8 | SEQ ID NO:809 |
| >SNP8NRG902867_allelePos=201 total len = 401 SNP=K chr8 | SEQ ID NO:810 |
| >SNP8NRG903255_allelePos=201 total len = 401 SNP=K chr8 | SEQ ID NO:811 |
| >SNP8NRG903311_allelePos=201 total len = 401 SNP=Y chr8 | SEQ ID NO:812 |
| >SNP8NRG903387_allelePos=201 total len = 401 SNP=M chr8 | SEQ ID NO:813 |
| >SNP8NRG904534_allelePos=201 total len = 401 SNP=R chr8 | SEQ ID NO:814 |
| >SNP8NRG904877_allelePos=201 total len = 401 SNP=S chr8 | SEQ ID NO:815 |
| >SNP8NRG906451_allelePos=201 total len = 401 SNP=K chr8 | SEQ ID NO:816 |
| >SNP8NRG906520_allelePos=201 total len = 401 SNP=R chr8 | SEQ ID NO:817 |
| >SNP8NRG906595_allelePos=201 total len = 401 SNP=Y chr8 | SEQ ID NO:818 |
| >SNP8NRG907716_allelePos=201 total len = 401 SNP=W chr8 | SEQ ID NO:819 |
| >SNP8NRG908003_allelePos=201 total len = 401 SNP=Y chr8 | SEQ ID NO:820 |
| >SNP8NRG908169_allelePos=201 total len = 401 SNP=Y chr8 | SEQ ID NO:821 |
| >SNP8NRG909966_allelePos=201 total len = 401 SNP=R chr8 | SEQ ID NO:822 |
| >SNP8NRG910888_allelePos=201 total len = 401 SNP=K chr8 | SEQ ID NO:823 |
| >SNP8NRG911200_allelePos=201 total len = 401 SNP=K chr8 | SEQ ID NO:824 |
| >SNP8NRG911948_allelePos=201 total len = 401 SNP=Y chr8 | SEQ ID NO:825 |
| >SNP8NRG912456_allelePos=201 total len = 401 SNP=K chr8 | SEQ ID NO:826 |
| >SNP8NRG913539_allelePos=201 total len = 401 SNP=S chr8 | SEQ ID NO:827 |
| >SNP8NRG914399_allelePos=201 total len = 401 SNP=W chr8 | SEQ ID NO:828 |
| >SNP8NRG914902_allelePos=201 total len = 401 SNP=K chr8 | SEQ ID NO:829 |
| >SNP8NRG915792_allelePos=201 total len = 401 SNP=Y chr8 | SEQ ID NO:830 |
| >SNP8NRG917096_allelePos=201 total len = 401 SNP=M chr8 | SEQ ID NO:831 |
| >SNP8NRG917995_allelePos=201 total len = 401 SNP=Y chr8 | SEQ ID NO:832 |
| >SNP8NRG918237_allelePos=201 total len = 401 SNP=R chr8 | SEQ ID NO:833 |
| >SNP8NRG918733_allelePos=201 total len = 401 SNP=M chr8 | SEQ ID NO:834 |
| >SNP8NRG919673_allelePos=201 total len = 401 SNP=Y chr8 | SEQ ID NO:835 |
| >SNP8NRG924154_allelePos=201 total len = 401 SNP=M chr8 | SEQ ID NO:836 |
| >SNP8NRG924440_alleIePos=201 total len = 401 SNP=R chr8 | SEQ ID NO:837 |
| >SNP8NRG924860_allelePos=201 total len = 401 SNP=R chr8 | SEQ ID NO:838 |
| >SNP8NRG925007_allelePos=201 total len = 401 SNP=R chr8 | SEQ ID NO:839 |
| >SNP8NRG927702_allelePos=201 total len = 401 SNP=R chr8 | SEQ ID NO:840 |
| >SNP8NRG927909_allelePos=201 total len = 401 SNP=R chr8 | SEQ ID NO:841 |
| >SNP8NRG933401_allelePos=201 total len = 401 SNP=Y chr8 | SEQ ID NO:842 |
| >SNP8NRG939408_allelePos=201 total len = 401 SNP=R chr8 | SEQ ID NO:843 |
| >SNP8NRG941153_allelePos=201 total len = 401 SNP=W chr8 | SEQ ID NO:844 |
| >SNP8NRG944063_allelePos=201 total len = 401 SNP=S chr8 | SEQ ID NO:845 |
| >SNP8NRG945384_allelePos=201 total len = 401 SNP=R chr8 | SEQ ID NO:846 |
| >SNP8NRG946599_allelePos=201 total len = 401 SNP=Y chr8 | SEQ ID NO:847 |
| >SNP8NRG946608_allelePos=201 total len = 401 SNP=M chr8 | SEQ ID NO:848 |
| >SNP8NRG948516_allelePos=201 total len = 401 SNP=R chr8 | SEQ ID NO:849 |
| >SNP8NRG948606_allelePos=201 total len = 401 SNP=R chr8 | SEQ ID NO:850 |
| >SNP8NRG950029_allelePos=201 total len = 401 SNP=S chr8 | SEQ ID NO:851 |
| >SNP8NRG95213O_allelePos=201 total len = 401 SNP=Y chr8 | SEQ ID NO:852 |
| >SNP8NRG952315_allelePos=201 total len = 401 SNP=Y chr8 | SEQ ID NO:853 |
| >SNP8NRG952840_allelePos=201 total len = 401 SNP=R chr8 | SEQ ID NO:854 |
| >SNP8NRG954510_allelePos=201 total len = 401 SNP=W chr8 | SEQ ID NO:855 |
| >SNP8NRG954665_allelePos=201 total len = 401 SNP=Y chr8 | SEQ ID NO:856 |
| >SNP8NRG955518_allelePos=201 total len = 401 SNP=R chr8 | SEQ ID NO:857 |
| >SNP8NRG957595_allelePos=201 total len = 401 SNP=Y chr8 | SEQ ID NO:858 |
| >SNP8NRG957774_allelePos=201 total len = 401 SNP=Y chr8 | SEQ ID NO:859 |
| >SNP8NRG957922_allelePos=201 total len = 401 SNP=K chr8 | SEQ ID NO:860 |
| >SNP8NRG957969_allelePos=201 total len = 401 SNP=B chr8 | SEQ ID NO:861 |
| >SNP8NRG958536_allelePos=201 total len = 401 SNP=Y chr8 | SEQ ID NO:862 |
| >SNP8NRG958857_allelePos=201 total len = 401 SNP=Y chr8 | SEQ ID NO:863 |
| >SNP8NRG959653_allelePos=201 total len = 401 SNP=Y chr8 | SEQ ID NO:864 |
| >SNP8NRG959711_allelePos=201 total len = 401 SNP=Y chr8 | SEQ ID NO:865 |
| >SNP8NRG961073_allelePos=201 total len = 401 SNP=M chr8 | SEQ ID NO:866 |
| >SNP8NRG963095_allelePos=201 total len = 401 SNP=R chr8 | SEQ ID NO:867 |
| >SNP8NRG964718_allelePos=201 total len = 401 SNP=Y chr8 | SEQ ID NO:868 |
| >SNP8NRG968345_allelePos=201 total len = 401 SNP=R chr8 | SEQ ID NO:869 |
| >SNP8NRG968552_allelePos=201 total len = 401 SNP=R chr8 | SEQ ID NO:870 |
| >SNP8NRG968905_allelePos=201 total len = 401 SNP=R chr8 | SEQ ID NO:871 |
| >SNP8NRG970142_allelePos=201 total len = 401 SNP=W chr8 | SEQ ID NO:872 |
| >SNP8NRG970426_allelePos=201 total len = 401 SNP=Y chr8 | SEQ ID NO:873 |
| >SNP8NRG971673_allelePos=201 total len = 401 SNP=W chr8 | SEQ ID NO:874 |
| >SNP8NRG975429_allelePos=201 total len = 401 SNP=Y chr8 | SEQ ID NO:875 |
| >SNP8NRG975591_allelePos=201 total len = 401 SNP=Y chr8 | SEQ ID NO:876 |
| >SNP8NRG975902_allelePos=201 total len = 401 SNP=R chr8 | SEQ ID NO:877 |
| >SNP8NRG975904_allelePos=201 total len = 401 SNP=M chr8 | SEQ ID NO:878 |
| >SNP8NRG975910_allelePos=201 total len = 401 SNP=W chr8 | SEQ ID NO:879 |
| >SNP8NRG976185_allelePos=201 total len = 401 SNP=Y chr8 | SEQ ID NO:880 |
| >SNP8NRG976339_allelePos=201 total len = 401 SNP=Y chr8 | SEQ ID NO:881 |
| >SNP8NRG976854_allelePos=201 total len = 401 SNP=K chr8 | SEQ ID NO:882 |
| >SNP8NRG977028_allelePos=201 total len = 401 SNP=W chr8 | SEQ ID NO:883 |
| >SNP8NRG978926_allelePos=201 total len = 401 SNP=M chr8 | SEQ ID NO:884 |
| >SNP8NRG980337_allelePos=201 total len = 401 SNP=R chr8 | SEQ ID NO:885 |
| >SNP8NRG980391_allelePos=201 total len = 401 SNP=R chr8 | SEQ ID NO:886 |
| >SNP8NRG980876_allelePos=201 total len = 401 SNP=Y chr8 | SEQ ID NO:887 |
| >SNP8NRG981087_allelePos=201 total len = 401 SNP=W chr8 | SEQ ID NO:888 |
| >SNP8NRG981623_allelePos=201 total len = 401 SNP=R chr8 | SEQ ID NO:889 |
| >SNP8NRG982292_allelePos=201 total len = 401 SNP=R chr8 | SEQ ID NO:890 |
| >SNP8NRG982439_allelePos=201 total len = 401 SNP=R chr8 | SEQ ID NO:891 |
| >SNP8NRG982535_allelePos=201 total len = 401 SNP=Y chr8 | SEQ ID NO:892 |
| >SNP8NRG983391_allelePos=201 total len = 401 SNP=Y chr8 | SEQ ID NO:893 |
| >SNP8NRG983576_allelePos=201 total len = 401 SNP=R chr8 | SEQ ID NO:894 |
| >SNP8NRG983658_allelePos=201 total len = 401 SNP=W chr8 | SEQ ID NO:895 |
| >SNP8NRG983795_allelePos=201 total len = 401 SNP=S chr8 | SEQ ID NO:896 |
| >SNP8NRG984008_allelePos=201 total len = 401 SNP=R chr8 | SEQ ID NO:897 |
| >SNP8NRG986427_allelePos=201 total len = 401 SNP=Y chr8 | SEQ ID NO:898 |
| >SNP8NRG987097_allelePos=201 total len = 401 SNP=K chr8 | SEQ ID NO:899 |
| >SNP8NRG987360_allelePos=201 total len = 401 SNP=M chr8 | SEQ ID NO:900 |
| >SNP8NRG988929_allelePos=201 total len = 401 SNP=Y chr8 | SEQ ID NO:901 |
| >SNP8NRG989310_allelePos=201 total len = 401 SNP=R chr8 | SEQ ID NO:902 |
| >SNP8NRG989590_allelePos=201 total len = 401 SNP=R chr8 | SEQ ID NO:903 |
| >SNP8NRG989865_allelePos=201 total len = 401 SNP=R chr8 | SEQ ID NO:904 |
| >SNP8NRG990875_allelePos=201 total len = 401 SNP=R chr8 | SEQ ID NO:905 |
| >SNP8NRG990877_allelePos=201 total len = 401 SNP=W chr8 | SEQ ID NO:906 |
| >SNP8NRG991343_allelePos=201 total len = 401 SNP=R chr8 | SEQ ID NO:907 |
| >SNP8NRG991385_allelePos=201 total len = 401 SNP=R chr8 | SEQ ID NO:908 |
| >SNP8NRG992001_allelePos=201 total len = 401 SNP=W chr8 | SEQ ID NO:909 |
| >SNP8NRG993049_allelePos=201 total len = 401 SNP=K chr8 | SEQ ID NO:910 |
| >SNP8NRG994284_allelePos=201 total len = 401 SNP=R chr8 | SEQ ID NO:911 |
| >SNP8NRG994731_allelePos=201 total len = 401 SNP=R chr8 | SEQ ID NO:912 |
| >SNP8NRG994801_allelePos=201 total len = 401 SNP=W chr8 | SEQ ID NO:913 |
| >SNP8NRG995251_allelePos=201 total len = 401 SNP=M chr8 | SEQ ID NO:914 |
| >SNP8NRG995465_allelePos=201 total len = 401 SNP=R chr8 | SEQ ID NO:915 |
| >SNP8NRG995529_allelePos=201 total len = 401 SNP=S chr8 | SEQ ID NO:916 |
| >SNP8NRG996334_allelePos=201 total len = 401 SNP=W chr8 | SEQ ID NO:917 |
| >SNP8NRG997541_allelePos=201 total len = 401 SNP=R chr8 | SEQ ID NO:918 |
| >SNP8NRG999080_allelePos=201 total len = 401 SNP=Y chr8 | SEQ ID NO:919 |
| >SNP8NRG999723_allelePos=201 total len = 401 SNP=W chr8 | SEQ ID NO:920 |
| >SNP8NRG1000240_allelePos=201 total len = 401 SNP=M chr8 | SEQ ID NO:921 |
| >SNP8NRG1000494_allelePos=201 total len = 401 SNP=K chr8 | SEQ ID NO:922 |
| >SNP8NRG1001640_allelePos=201 total len = 401 SNP=Y chr8 | SEQ ID NO:923 |
| >SNP8NRG1001909_allelePos=201 total len = 401 SNP=M chr8 | SEQ ID NO:924 |
| >SNP8NRG1002168_allelePos=201 total len = 401 SNP=R chr8 | SEQ ID NO:925 |
| >SNP8NRG1002347_allelePos=201 total len = 401 SNP=Y chr8 | SEQ ID NO:926 |
| >SNP8NRG1002489_allelePos=201 total len = 401 SNP=W chr8 | SEQ ID NO:927 |
| >SNP8NRG1002490_allelePos=201 total len = 401 SNP=M chr8 | SEQ ID NO:928 |
| >SNP8NRG1005338_allelePos=201 total len = 401 SNP=M chr8 | SEQ ID NO:929 |
| >SNP8NRG1006758_allelePos=201 total len = 401 SNP=R chr8 | SEQ ID NO:930 |
| >SNP8NRG1007029_allelePos=201 total len = 401 SNP=Y chr8 | SEQ ID NO:931 |
| >SNP8NRG1007161_allelePos=201 total len = 401 SNP=R chr8 | SEQ ID NO:932 |
| >SNP8NRG1007492_allelePos=201 total len = 401 SNP=K chr8 | SEQ ID NO:933 |
| >SNP8NRG1007522_allelePos=201 total len = 401 SNP=Y chr8 | SEQ ID NO:934 |
| >SNP8NkG1008327_allelePos=201 total len = 401 SNP=Y chr8 | SEQ ID NO:935 |
| >SNP8NRG1009154_allelePos=201 total len = 401 SNP=R chr8 | SEQ ID NO:936 |
| >SNP8NRG1009558_allelePos=201 total len = 401 SNP=Y chr8 | SEQ ID NO:937 |
| >SNP8NRG1010792_allelePos=201 total len = 401 SNP=W chr8 | SEQ ID NO:938 |
| >SNP8NRG1011358_allelePos=201 total len = 401 SNP=R chr8 | SEQ ID NO:939 |
| >SNP8NRG1011526_allelePos=201 total len = 401 SNP=R chr8 | SEQ ID NO:940 |
| >SNP8NRG1013903_allelePos=201 total len = 401 SNP=Y chr8 | SEQ ID NO:941 |
| >SNP8NRG1016740_allelePos=201 total len = 401 SNP=W chr8 | SEQ ID NO:942 |
| >SNP8NRG1016775_allelePos=201 total len = 401 SNP=W chr8 | SEQ ID NO:943 |
| >SNP8NRG1017450_allelePos=201 total len = 401 SNP=Y chr8 | SEQ ID NO:944 |
| >SNP8NRG1017559_allelePos=201 total len = 401 SNP=Y chr8 | SEQ ID NO:945 |
| >SNP8NRG1019430_allelePos=201 total len = 401 SNP=R chr8 | SEQ ID NO:946 |
| >SNP8NRG1020682_allelePos=201 total len = 401 SNP=Y chr8 | SEQ ID NO:947 |
| >SNP8NRG1021012_allelePos=201 total len = 401 SNP=Y chr8 | SEQ ID NO:948 |
| >SNP8NRG1021078_allelePos=201 total len = 401 SNP=R chr8 | SEQ ID NO:949 |
| >SNP8NRG1021666_allelePos=201 total len = 401 SNP=Y chr8 | SEQ ID NO:950 |
| >SNP8NRG1021687_allelePos=201 total len = 401 SNP=K chr8 | SEQ ID NO:951 |
| >SNP8NRG1022025_allelePos=201 total len = 401 SNP=Y chr8 | SEQ ID NO:952 |
| >SNP8NRG1024324_allelePos=201 total len = 401 SNP=Y chr8 | SEQ ID NO:953 |
| >SNP8NRG1024505_allelePos=201 total len = 401 SNP=M chr8 | SEQ ID NO:954 |
| >SNP8NRG1024598_allelePos=201 total len = 401 SNP=R chr8 | SEQ ID NO:955 |
| >SNP8NRG1025427_allelePos=201 total len = 401 SNP=W chr8 | SEQ ID NO:956 |
| >SNP8NRG1026138_allelePos=201 total len = 401 SNP=R chr8 | SEQ ID NO:957 |
| >SNP8NRG1027681_allelePos=201 total len = 401 SNP=R chr8 | SEQ ID NO:958 |
| >SNP8NRG1030217_allelePos=201 total len = 401 SNP=R chr8 | SEQ ID NO:959 |
| >SNP8NRG1030817_allelePos=201 total len = 401 SNP=R chr8 | SEQ ID NO:960 |
| >SNP8NRG1033196_allelePos=201 total len = 401 SNP=K chr8 | SEQ ID NO:961 |
| >SNP8NRG1033262_allelePos=201 total len = 401 SNP=R chr8 | SEQ ID NO:962 |
| >SNP8NRG1033263_allelePos=201 total len = 401 SNP=R chr8 | SEQ ID NO:963 |
| >SNP8NRG1035657_allelePos=201 total len = 401 SNP=Y chr8 | SEQ ID NO:964 |
| >SNP8NRG1035864_allelePos=201 total len = 401 SNP=K chr8 | SEQ ID NO:965 |
| >SNP8NRG1041189_allelePos=201 total len = 401 SNP=S chr8 | SEQ ID NO:966 |
| >SNP8NRG1041327_allelePos=201 total len = 401 SNP=Y chr8 | SEQ ID NO:967 |
| >SNP8NRG1042979_allelePos=201 total len = 401 SNP=R chr8 | SEQ ID NO:968 |
| >SNP8NRG1043231_allelePos=201 total len = 401 SNP=S chr8 | SEQ ID NO:969 |
| >SNP8NRG1044228_allelePos=201 total len = 401 SNP=Y chr8 | SEQ ID NO:970 |
| >SNP8NRG1050090_allelePos=201 total len = 401 SNP=Y chr8 | SEQ ID NO:971 |
| >SNP8NRG1050818_allelePos=201 total len = 401 SNP=W chr8 | SEQ ID NO:972 |
| >SNP8NRG1051118_allelePos=201 total len = 401 SNP=K chr8 | SEQ ID NO:973 |
| >SNP8NRG1052472_allelePos=201 total len = 401 SNP=Y chr8 | SEQ ID NO:974 |
| >SNP8NRG1052592_allelePos=201 total len = 401 SNP=K chr8 | SEQ ID NO:975 |
| >SNP8NRG1052642_allelePos=201 total len = 401 SNP=Y chr8 | SEQ ID NO:976 |
| >SNP8NRG1053241_allelePos=201 total len = 401 SNP=Y chr8 | SEQ ID NO:977 |
| >SNP8NRG1053476_allelePos=201 total len = 401 SNP=R chr8 | SEQ ID NO:978 |
| >SNP8NRG1054505_allelePos=201 total len = 401 SNP=Y chr8 | SEQ ID NO:979 |
| >SNP8NRG1055802_allelePos=201 total len = 401 SNP=R chr8 | SEQ ID NO:980 |
| >SNP8NRG1055823_allelePos=201 total len = 401 SNP=Y chr8 | SEQ ID NO:981 |
| >SNP8NRG1056346_allelePos=201 total len = 401 SNP=M chr8 | SEQ ID NO:982 |
| >SNP8NRG1059642_allelePos=201 total len = 401 SNP=K chr8 | SEQ ID NO:983 |
| >SNP8NRG1059758_allelePos=201 total len = 401 SNP=R chr8 | SEQ ID NO:984 |
| >SNP8NRG1059805_allelePos=201 total len = 401 SNP=R chr8 | SEQ ID NO:985 |
| >SNP8NRG1063211_allelePos=201 total len = 401 SNP=Y chr8 | SEQ ID NO:986 |
| >SNP8NRG1064262_allelePos=201 total len = 401 SNP=R chr8 | SEQ ID NO:987 |
| >SNP8NRG1065961_allelePos=201 total len = 401 SNP=R chr8 | SEQ ID NO:988 |
| >SNP8NRG1070770_allelePos=201 total len = 401 SNP=K chr8 | SEQ ID NO:989 |
| >SNP8NRG1071757_allelePos=201 total len = 401 SNP=W chr8 | SEQ ID NO:990 |
| >SNP8NRG1072396_allelePos=201 total len = 401 SNP=R chr8 | SEQ ID NO:991 |
| >SNP8NRG1072954_aIlelePos=201 total len = 401 SNP=S chr8 | SEQ ID NO:992 |
| >SNP8NRG1073158_allelePos=201 total len = 401 SNP=Y chr8 | SEQ ID NO:993 |
| >SNP8NRG1073175_allelePos=201 total len = 401 SNP=S chr8 | SEQ ID NO:994 |
| >SNP8NRG1073449_allelePos=201 total len = 401 SNP=R chr8 | SEQ ID NO:995 |
| >SNP8NRG1074074_allelePos=201 total len = 401 SNP=R chr8 | SEQ ID NO:996 |
| >SNP8NRG1074140_allelePos=201 total len = 401 SNP=R chr8 | SEQ ID NO:997 |
| >SNP8NRG1074713_allelePos=201 total len = 401 SNP=R chr8 | SEQ ID NO:998 |
| >SNP8NRG1074905_allelePos=201 total len = 401 SNP=W chr8 | SEQ ID NO:999 |
| >SNP8NRG1075359_allelePos=201 total len = 401 SNP=S chr8 | SEQ ID NO:1000 |
| >SNP8NRG1075432_allelePos=201 total len = 401 SNP=R chr8 | SEQ ID NO:1001 |
| >SNP8NRG1075912_allelePos=201 total len = 401 SNP=R chr8 | SEQ ID NO:1002 |
| >SNP8NRG1075926_allelePos=201 total len = 401 SNP=Y chr8 | SEQ ID NO:1003 |
| >SNP8NRG1077472_allelePos=201 total len = 401 SNP=Y chr8 | SEQ ID NO:1004 |
| >SNP8NRG1077504_allelePos=201 total len = 401 SNP=Y chr8 | SEQ ID NO:1005 |
| >SNP8NRG1077529_allelePos=201 total len = 401 SNP=Y chr8 | SEQ ID NO:1006 |
| >SNP8NRG1077826_allelePos=201 total len = 401 SNP=Y chr8 | SEQ ID NO:1007 |
| >SNP8NRG1078867_allelePos=201 total len = 401 SNP=Y chr8 | SEQ ID NO:1008 |
| >SNP8NRG1079133_allelePos=201 total len = 401 SNP=Y chr8 | SEQ ID NO:1009 |
| >SNP8NRG1080162_allelePos=201 total len = 401 SNP=Y chr8 | SEQ ID NO:1010 |
| >SNP8NRG1080340_allelePos=201 total len = 401 SNP=R chr8 | SEQ ID NO:1011 |
| >SNP8NRG1081302_allelePos=201 total len = 401 SNP=W chr8 | SEQ ID NO:1012 |
| >SNP8NRG1081346_allelePos=201 total len = 401 SNP=R chr8 | SEQ ID NO:1013 |
| >SNP8NRG1081690_allelePos=201 total len = 401 SNP=Y chr8 | SEQ ID NO:1014 |
| >SNP8NRG1082234_allelePos=201 total len = 401 SNP=K chr8 | SEQ ID NO:1015 |
| >SNP8NRG1084388_allelePos=201 total len = 401 SNP=R chr8 | SEQ ID NO:1016 |
| >SNP8NRG1084888_allelePos=201 total len = 401 SNP=R chr8 | SEQ ID NO:1017 |
| >SNP8NRG1084948_allelePos=201 total len = 401 SNP=R chr8 | SEQ ID NO:1018 |
| >SNP8NRG1085057_allelePos=201 total len = 401 SNP=Y chr8 | SEQ ID NO:1019 |
| >SNP8NRG1085579_allelePos=201 total len = 401 SNP=W chr8 | SEQ ID NO:1020 |
| >SNP8NRG1085768_allelePos=201 total len = 401 SNP=R chr8 | SEQ ID NO:1021 |
| >SNP8NRG1085843_allelePos=201 total len = 401 SNP=R chr8 | SEQ ID NO:1022 |
| >SNP8NRG1086222_allelePos=201 total len = 401 SNP=Y chr8 | SEQ ID NO:1023 |
| >SNP8NRG1086670_allelePos=201 total len = 401 SNP=W chr8 | SEQ ID NO:1024 |
| >SNP8NRG1086728_allelePos=201 total len = 401 SNP=R chr8 | SEQ ID NO:1025 |
| >SNP8NRG1086908_allelePos=201 total len = 401 SNP=M chr8 | SEQ ID NO:1026 |
| >SNP8NRG1087118_allelePos=201 total len = 401 SNP=R chr8 | SEQ ID NO:1027 |
| >SNP8NRG1087240_allelePos=201 total len = 401 SNP=R chr8 | SEQ ID NO:1028 |
| >SNP8NRG1087428_allelePos=201 total len = 401 SNP=S chr8 | SEQ ID NO:1029 |
| >SNP8NRG1087820_allelePos=201 total len = 401 SNP=R chr8 | SEQ ID NO:1030 |
| >SNP8NRG1088704_allelePos=201 total len = 401 SNP=R chr8 | SEQ ID NO:1031 |
| >SNP8NRG1089013_allelePos=201 total len = 401 SNP=R chr8 | SEQ ID NO:1032 |
| >SNP8NRG1089629_allelePos=201 total len = 401 SNP=Y chr8 | SEQ ID NO:1033 |
| >SNP8NRG1090228_allelePos=201 total len = 401 SNP=Y chr8 | SEQ ID NO:1034 |
| >SNP8NRG1091105_allelePos=201 total len = 401 SNP=Y chr8 | SEQ ID NO:1035 |
| >SNP8NRG1091106_allelePos=201 total len = 401 SNP=R chr8 | SEQ ID NO:1036 |
| >SNP8NRG1091332_allelePos=201 total len = 401 SNP=W chr8 | SEQ ID NO:1037 |
| >SNP8NRG1091369_allelePos=201 total len = 401 SNP=M chr8 | SEQ ID NO:1038 |
| >SNP8NRG1091740_allelePos=201 total len = 401 SNP=Y chr8 | SEQ ID NO:1039 |
| >SNP8NRG1092329_allelePos=201 total len = 401 SNP=Y chr8 | SEQ ID NO:1040 |
| >SNP8NRG1092343_allelePos=201 total len = 401 SNP=R chr8 | SEQ ID NO:1041 |
| >SNP8NRG1092685_allelePos=201 total len = 401 SNP=Y chr8 | SEQ ID NO:1042 |
| >SNP8NRG1093149_allelePos=201 total len = 401 SNP=K chr8 | SEQ ID NO:1043 |
| >SNP8NRG1093230_allelePos=201 total len = 401 SNP=Y chr8 | SEQ ID NO:1044 |
| >SNP8NRG1093250_allelePos=201 total len = 401 SNP=R chr8 | SEQ ID NO:1045 |
| >SNP8NRG1093832_allelePos=201 total len = 401 SNP=R chr8 | SEQ ID NO:1046 |
| >SNP8NRG1093969_allelePos=201 total len = 401 SNP=Y chr8 | SEQ ID NO:1047 |
| >SNP8NRG1094264_allelePos=201 total len = 401 SNP=R chr8 | SEQ ID NO:1048 |
| >SNP8NRG1094391_allelePos=201 total len = 401 SNP=S chr8 | SEQ ID NO:1049 |
| >SNP8NRG1094767_allelePos=201 total len = 401 SNP=S chr8 | SEQ ID NO:1050 |
| >SNP8NRG1094784_allelePos=201 total len = 401 SNP=S chr8 | SEQ ID NO:1051 |
| >SNP8NRG1095625_allelePos=201 total len = 401 SNP=R chr8 | SEQ ID NO:1052 |
| >SNP8NRG1095986_allelePos=201 total len = 401 SNP=R chr8 | SEQ ID NO:1053 |
| >SNP8NRG1096319_allelePos=201 total len = 401 SNP=R chr8 | SEQ ID NO:1054 |
| >SNP8NRG1096411_allelePos=201 total len = 401 SNP=R chr8 | SEQ ID NO:1055 |
| >SNP8NRG1097191_allelePos=201 total len = 401 SNP=M chr8 | SEQ ID NO:1056 |
| >SNP8NRG1097583_allelePos=201 total len = 401 SNP=R chr8 | SEQ ID NO:1057 |
| >SNP8NRG1098672_allelePos=201 total len = 401 SNP=R chr8 | SEQ ID NO:1058 |
| >SNP8NRG1098870_allelePos=201 total len = 401 SNP=Y chr8 | SEQ ID NO:1059 |
| >SNP8NRG1099281_allelePos=201 total len = 401 SNP=Y chr8 | SEQ ID NO:1060 |
| >SNP8NRG1100717_allelePos=201 total len = 401 SNP=Y chr8 | SEQ ID NO:1061 |
| >SNP8NRG1101278_allelePos=201 total len = 401 SNP=K chr8 | SEQ ID NO:1062 |
| >SNP8NRG1101507_allelePos=201 total len = 401 SNP=K chr8 | SEQ ID NO:1063 |
| >SNP8NRG1101681_allelePos=201 total len = 401 SNP=K chr8 | SEQ ID NO:1064 |
| >SNP8NRG1101701_allelePos=201 total len = 401 SNP=Y chr8 | SEQ ID NO:1065 |
| >SNP8NRG1101907_alleIePos=201 total len = 401 SNP=K chr8 | SEQ ID NO:1066 |
| >SNP8NRG1102723_allelePos=201 total len = 401 SNP=Y chr8 | SEQ ID NO:1067 |
| >SNP8NRG1102729_allelePos=201 total len = 401 SNP=Y chr8 | SEQ ID NO:1068 |
| >SNP8NRG1102907_allelePos=201 total len = 401 SNP=R chr8 | SEQ ID NO:1069 |
| >SNP8NRG1103158_allelePos=201 total len = 401 SNP=R chr8 | SEQ ID NO:1070 |
| >SNP8NRG1104559_allelePos=201 total len = 401 SNP=R chr8 | SEQ ID NO:1071 |
| >SNP8NRG1104831_allelePos=201 total len = 401 SNP=R chr8 | SEQ ID NO:1072 |
| >SNP8NRG1106244_allelePos=201 total len = 401 SNP=R chr8 | SEQ ID NO:1073 |
| >SNP8NRG1106245_allelePos=201 total len = 401 SNP=W chr8 | SEQ ID NO:1074 |
| >SNP8NRG1106280_allelePos=201 total len = 401 SNP=Y chr8 | SEQ ID NO:1075 |
| >SNP8NRG1106349_allelePos=201 total len = 401 SNP=Y chr8 | SEQ ID NO:1076 |
| >SNP8NRG1107164_allelePos=201 total len = 401 SNP=R chr8 | SEQ ID NO:1077 |
| >SNP8NRG1107173_allelePos=201 total len = 401 SNP=Y chr8 | SEQ ID NO:1078 |
| >SNP8NRG1107757_allelePos=201 total len = 401 SNP=K chr8 | SEQ ID NO:1079 |
| >SNP8NRG1107813_allelePos=201 total len = 401 SNP=Y chr8 | SEQ ID NO:1080 |
| >SNP8NRG1108109_allelePos=201 total len = 401 SNP=Y chr8 | SEQ ID NO:1081 |
| >SNP8NRG1108375_allelePos=201 total len = 401 SNP=Y chr8 | SEQ ID NO:1082 |
| >SNP8NRG1109352_allelePos=201 total len = 401 SNP=M chr8 | SEQ ID NO:1083 |
| >SNP8NRG1109518_allelePos=201 total len = 401 SNP=Y chr8 | SEQ ID NO:1084 |
| >SNP8NRG1110232_allelePos=201 total len = 401 SNP=R chr8 | SEQ ID NO:1085 |
| >SNP8NRG1110825_allelePos=201 total len = 401 SNP=M chr8 | SEQ ID NO:1086 |
| >SNP8NRG1113329_allelePos=201 total len = 401 SNP=W chr8 | SEQ ID NO:1087 |
| >SNP8NRG1113984_allelePos=201 total len = 401 SNP=Y chr8 | SEQ ID NO:1088 |
| >SNP8NRG1114175_allelePos=201 total len = 401 SNP=Y chr8 | SEQ ID NO:1089 |
| >SNP8NRG111626O_allelePos=201 total len = 401 SNP=Y chr8 | SEQ ID NO:1090 |
| >SNP8NRG1118220_allelePos=201 total len = 401 SNP=R chr8 | SEQ ID NO:1091 |
| >SNP8NRG1140135_allelePos=201 total len = 401 SNP=Y chr8 | SEQ ID NO:1092 |
| >SNP8NRG1184279_allelePos=201 total len = 401 SNP=K chr8 | SEQ ID NO:1093 |
| >SNP8NRG1208516_allelePos=201 total len = 401 SNP=S chr8 | SEQ ID NO:1094 |
| >SNP8NRG1208518_allelePos=201 total len = 401 SNP=K chr8 | SEQ ID NO:1095 |
| >SNP8NRG1229502_allelePos=201 total len = 401 SNP=Y chr8 | SEQ ID NO:1096 |
| >SNP8NRG1252121_allelePos=201 total len = 401 SNP=M chr8 | SEQ ID NO:1097 |
| >SNP8NRG1253799_allelePos=201 total len = 401 SNP=K chr8 | SEQ ID NO:1098 |
| >SNP8NRG1253879_allelePos=201 total len = 401 SNP=W chr8 | SEQ ID NO:1099 |
| >SNP8NRG1254271_allelePos=201 total len = 401 SNP=R chr8 | SEQ ID NO:1100 |
| >SNP8NRG1254314_allelePos=201 total len = 401 SNP=M chr8 | SEQ ID NO:1101 |
| >SNP8NRG1254664_allelePos=201 total len = 401 SNP=R chr8 | SEQ ID NO:1102 |
| >SNP8NRG1255046_allelePos=201 total len = 401 SNP=R chr8 | SEQ ID NO:1103 |
| >SNP8NRG1255125_allelePos=201 total len = 401 SNP=W chr8 | SEQ ID NO:1104 |
| >SNP8NRG1255741_allelePos=201 total len = 401 SNP=R chr8 | SEQ ID NO:1105 |
| >SNP8NRG1255914_allelePos=201 total len = 401 SNP=S chr8 | SEQ ID NO:1106 |
| >SNP8NRG1255957_allelePos=201 total len = 401 SNP=W chr8 | SEQ ID NO:1107 |
| >SNP8NRG1256067_allelePos=201 total len = 401 SNP=W chr8 | SEQ ID NO:1108 |
| >SNP8NRG1256662_allelePos=201 total len = 401 SNP=Y chr8 | SEQ ID NO:1109 |
| >SNP8NRG1257547_allelePos=201 total len = 401 SNP=W chr8 | SEQ ID NO:1110 |
| >SNP8NRG1257630_allelePos=201 total len = 401 SNP=R chr8 | SEQ ID NO:1111 |
| >SNP8NRG1258199_allelePos=201 total len = 401 SNP=Y chr8 | SEQ ID NO:1112 |
| >SNP8NRG1259875_allelePos=201 total len = 401 SNP=R chr8 | SEQ ID NO:1113 |
| >SNP8NRG1259962_allelePos=201 total len = 401 SNP=R chr8 | SEQ ID NO:1114 |
| >SNP8NRG1260209_allelePos=201 total len = 401 SNP=Y chr8 | SEQ ID NO:1115 |
| >SNP8NRG1262000_allelePos=201 total len = 401 SNP=R chr8 | SEQ ID NO:1116 |
| >SNP8NRG1263565_allelePos=201 total len = 401 SNP=K chr8 | SEQ ID NO:1117 |
| >SNP8NRG1264984_allelePos=201 total len = 401 SNP=S chr8 | SEQ ID NO:1118 |
| >SNP8NRG1265298_allelePos=201 total len = 401 SNP=M chr8 | SEQ ID NO:1119 |
| >SNP8NRG1265868_allelePos=201 total len = 401 SNP=R chr8 | SEQ ID NO:1120 |
| >SNP8NRG1266163_allelePos=201 total len = 401 SNP=Y chr8 | SEQ ID NO:1121 |
| >SNP8NRG1266815_allelePos=201 total len = 401 SNP=M chr8 | SEQ ID NO:1122 |
| >SNP8NRG1266842_allelePos=201 total len = 401 SNP=R chr8 | SEQ ID NO:1123 |
| >SNP8NRG1267431_allelePos=201 total len = 401 SNP=Y chr8 | SEQ ID NO:1124 |
| >SNP8NRG1267974_allelePos=201 total len = 401 SNP=R chr8 | SEQ ID NO:1125 |
| >SNP8NRG1268435_allelePos=201 total len = 401 SNP=W chr8 | SEQ ID NO:1126 |
| >SNP8NRG1268860_allelePos=201 total len = 401 SNP=W chr8 | SEQ ID NO:1127 |
| >SNP8NRG1269159_allelePos=201 total len = 401 SNP=Y chr8 | SEQ ID NO:1128 |
| >SNP8NRG1270128_allelePos=201 total len = 401 SNP=K chr8 | SEQ ID NO:1129 |
| >SNP8NRG1271589_allelePos=201 total len = 401 SNP=K chr8 | SEQ ID NO:1130 |
| >SNP8NRG1272260_allelePos=201 total len = 401 SNP=R chr8 | SEQ ID NO:1131 |
| >SNP8NRG1272304_allelePos=201 total len = 401 SNP=R chr8 | SEQ ID NO:1132 |
| >SNP8NRG1272374_allelePos=201 total len = 401 SNP=W chr8 | SEQ ID NO:1133 |
| >SNP8NRG1272464_allelePos=201 total len = 401 SNP=W chr8 | SEQ ID NO:1134 |
| >SNP8NRG1272543_allelePos=201 total len = 401 SNP=M chr8 | SEQ ID NO:1135 |
| >SNP8NRG1272668_allelePos=201 total len = 401 SNP=R chr8 | SEQ ID NO:1136 |
| >SNP8NRG1272888_allelePos=201 total len = 401 SNP=R chr8 | SEQ ID NO:1137 |
| >SNP8NRG1273061_alleIePos=201 total len = 401 SNP=S chr8 | SEQ ID NO:1138 |
| >SNP8NRG1273077_allelePos=201 total len = 401 SNP=Y chr8 | SEQ ID NO:1139 |
| >SNP8NRG1273166_allelePos=201 total len = 401 SNP=R chr8 | SEQ ID NO:1140 |
| >SNP8NRG1273740_allelePos=201 total len = 401 SNP=W chr8 | SEQ ID NO:1141 |
| >SNP8NRG1273827_allelePos=201 total len = 401 SNP=R chr8 | SEQ ID NO:1142 |
| >SNP8NRG1274180_allelePos=201 total len = 401 SNP=S chr8 | SEQ ID NO:1143 |
| >SNP8NRG1274457_allelePos=201 total len = 401 SNP=M chr8 | SEQ ID NO:1144 |
| >SNP8NRG1274783_allelePos=201 total len = 401 SNP=R chr8 | SEQ ID NO:1145 |
| >SNP8NRG1274969_allelePos=201 total len = 401 SNP=K chr8 | SEQ ID NO:1146 |
| >SNP8NRG1275610_allelePos=201 total len = 401 SNP=Y chr8 | SEQ ID NO:1147 |
| >SNP8NRG1275799_allelePos=201 total len = 401 SNP=R chr8 | SEQ ID NO:1148 |
| >SNP8NRG1276037_allelePos=201 total len = 401 SNP=R chr8 | SEQ ID NO:1149 |
| >SNP8NRG1276414_allelePos=201 total len = 401 SNP=R chr8 | SEQ ID NO:1150 |
| >SNP8NRG1276446_allelePos=201 total len = 401 SNP=R chr8 | SEQ ID NO:1151 |
| >SNP8NRG1276637_allelePos=201 total len = 401 SNP=S chr8 | SEQ ID NO:1152 |
| >SNP8NRG1277059_allelePos=201 total len = 401 SNP=K chr8 | SEQ ID NO:1153 |
| >SNP8NRG1277472_allelePos=201 total len = 401 SNP=M chr8 | SEQ ID NO:1154 |
| >SNP8NRG1278314_allelePos=201 total len = 401 SNP=R chr8 | SEQ ID NO:1155 |
| >SNP8NRG1278795_allelePos=201 total len = 401 SNP=R chr8 | SEQ ID NO:1156 |
| >SNP8NRG1278988_allelePos=201 total len = 401 SNP=Y chr8 | SEQ ID NO:1157 |
| >SNP8NRG1279521_allelePos=201 total len = 401 SNP=S chr8 | SEQ ID NO:1158 |
| >SNP8NRG1280302_allelePos=201 total len = 401 SNP=R chr8 | SEQ ID NO:1159 |
| >SNP8NRG1280674_allelePos=201 total len = 401 SNP=Y chr8 | SEQ ID NO:1160 |
| >SNP8NRG1281150_allelePos=201 total len = 401 SNP=R chr8 | SEQ ID NO:1161 |
| >SNP8NRG1282634_allelePos=201 total len = 401 SNP=R chr8 | SEQ ID NO:1162 |
| >SNP8NRG1282925_allelePos=201 total len = 401 SNP=R chr8 | SEQ ID NO:1163 |
| >SNP8NRG1283083_allelePos=201 total len = 401 SNP=R chr8 | SEQ ID NO:1164 |
| >SNP8NRG1285544_allelePos=201 total len = 401 SNP=R chr8 | SEQ ID NO:1165 |
| >SNP8NRG1285783_allelePos=201 total len = 401 SNP=W chr8 | SEQ ID NO:1166 |
| >SNP8NRG1286299_allelePos=201 total len = 401 SNP=M chr8 | SEQ ID NO:1167 |
| >SNP8NRG1286599_allelePos=201 total len = 401 SNP=M chr8 | SEQ ID NO:1168 |
| >SNP8NRG1286701_allelePos=201 total len = 401 SNP=M chr8 | SEQ ID NO:1169 |
| >SNP8NRG1288413_allelePos=201 total len = 401 SNP=R chr8 | SEQ ID NO:1170 |
| >SNP8NRG1290436_allelePos=201 total len = 401 SNP=Y chr8 | SEQ ID NO:1171 |
| >SNP8NRG1290470_allelePos=201 total len = 401 SNP=M chr8 | SEQ ID NO:1172 |
| >SNP8NRG1290477_allelePos=201 total len = 401 SNP=Y chr8 | SEQ ID NO:1173 |
| >SNP8NRG1291862_allelePos=201 total len = 401 SNP=S chr8 | SEQ ID NO:1174 |
| >SNP8NRG1294980_allelePos=201 total len = 401 SNP=R chr8 | SEQ ID NO:1175 |
| >SNP8NRG1295146_allelePos=201 total len = 401 SNP=S chr8 | SEQ ID NO:1176 |
| >SNP8NRG1295606_allelePos=201 total len = 401 SNP=Y chr8 | SEQ ID NO:1177 |
| >SNP8NRG1298104_allelePos=201 total len = 401 SNP=R chr8 | SEQ ID NO:1178 |
| >SNP8NRG1298536_allelePos=201 total len = 401 SNP=Y chr8 | SEQ ID NO:1179 |
| >SNP8NRG1299696_allelePos=201 total len = 401 SNP=Y chr8 | SEQ ID NO:1180 |
| >SNP8NRG1300226_allelePos=201 total len = 401 SNP=S chr8 | SEQ ID NO:1181 |
| >SNP8NRG1300286_allelePos=201 total len = 401 SNP=K chr8 | SEQ ID NO:1182 |
| >SNP8NRG1301275_allelePos=201 total len = 401 SNP=K chr8 | SEQ ID NO:1183 |
| >SNP8NRG1301666_allelePos=201 total len = 401 SNP=W chr8 | SEQ ID NO:1184 |
| >SNP8NRG1301678_allelePos=201 total len = 401 SNP=Y chr8 | SEQ ID NO:1185 |
| >SNP8NRG1301762_allelePos=201 total len = 401 SNP=Y chr8 | SEQ ID NO:1186 |
| >SNP8NRG1301912_allelePos=201 total len = 401 SNP=Y chr8 | SEQ ID NO:1187 |
| >SNP8NRG1302463_allelePos=201 total len = 401 SNP=W chr8 | SEQ ID NO:1188 |
| >SNP8NRG1302705_allelePos=201 total len = 401 SNP=S chr8 | SEQ ID NO:1189 |
| >SNP8NRG1303192_allelePos=201 total len = 401 SNP=M chr8 | SEQ ID NO:1190 |
| >SNP8NRG1304742_allelePos=201 total len = 401 SNP=Y chr8 | SEQ ID NO:1191 |
| >SNP8NRG1305338_allelePos=201 total len = 401 SNP=Y chr8 | SEQ ID NO:1192 |
| >SNP8NRG1307133_allelePos=201 total len = 401 SNP=K chr8 | SEQ ID NO:1193 |
| >SNP8NRG1307451_allelePos=201 total len = 401 SNP=R chr8 | SEQ ID NO:1194 |
| >SNP8NRG1307639_allelePos=201 total len = 401 SNP=W chr8 | SEQ ID NO:1195 |
| >SNP8NRG1308273_allelePos=201 total len = 401 SNP=R chr8 | SEQ ID NO:1196 |
| >SNP8NRG1308395_allelePos=201 total len = 401 SNP=W chr8 | SEQ ID NO:1197 |
| >SNP8NRG1308400_allelePos=201 total len = 401 SNP=Y chr8 | SEQ ID NO:1198 |
| >SNP8NRG1308418_allelePos=201 total len = 401 SNP=R chr8 | SEQ ID NO:1199 |
| >SNP8NRG1308442_allelePos=201 total len = 401 SNP=Y chr8 | SEQ ID NO:1200 |
| >SNP8NRG1308461_allelePos=201 total len = 401 SNP=K chr8 | SEQ ID NO:1201 |
| >SNP8NRG1308468_allelePos=201 total len = 401 SNP=R chr8 | SEQ ID NO:1202 |
| >SNP8NRG1308493_allelePos=201 total len = 401 SNP=R chr8 | SEQ ID NO:1203 |
| >SNP8NRG1308501_allelePos=201 total len = 401 SNP=R chr8 | SEQ ID NO:1204 |
| >SNP8NRG1308514_allelePos=201 total len = 401 SNP=R chr8 | SEQ ID NO:1205 |
| >SNP8NRG1309256_allelePos=201 total len = 401 SNP=W chr8 | SEQ ID NO:1206 |
| >SNP8NRG1309951_allelePos=201 total len = 401 SNP=Y chr8 | SEQ ID NO:1207 |
| >SNP8NRG1310295_allelePos=201 total len = 401 SNP=M chr8 | SEQ ID NO:1208 |
| >SNP8NRG1311432_allelePos=201 total len = 401 SNP=R chr8 | SEQ ID NO:1209 |
| >SNP8NRG1311607_allelePos=201 total len = 401 SNP=M chr8 | SEQ ID NO:1210 |
| >SNP8NRG1311887_allelePos=201 total len = 401 SNP=M chr8 | SEQ ID NO:1211 |
| >SNP8NRG1314245_allelePos=201 total len = 401 SNP=R chr8 | SEQ ID NO:1212 |
| >SNP8NRG1314574_allelePos=201 total len = 401 SNP=M chr8 | SEQ ID NO:1213 |
| >SNP8NRG1315474_allelePos=201 total len = 401 SNP=R chr8 | SEQ ID NO:1214 |
| >SNP8NRG1317178_allelePos=201 total len = 401 SNP=R chr8 | SEQ ID NO:1215 |
| >SNP8NRG1317711_allelePos=201 total len = 401 SNP=Y chr8 | SEQ ID NO:1216 |
| >SNP8NRG1318681_allelePos=201 total len = 401 SNP=R chr8 | SEQ ID NO:1217 |
| >SNP8NRG1318959_allelePos=201 total len = 401 SNP=Y chr8 | SEQ ID NO:1218 |
| >SNP8NRG1319332_allelePos=201 total len = 401 SNP=M chr8 | SEQ ID NO:1219 |
| >SNP8NRG1319542_allelePos=201 total len = 401 SNP=R chr8 | SEQ ID NO:1220 |
| >SNP8NRG1320206_allelePos=201 total len = 401 SNP=M chr8 | SEQ ID NO:1221 |
| >SNP8NRG1320216_allelePos=201 total len = 401 SNP=Y chr8 | SEQ ID NO:1222 |
| >SNP8NRG1320493_allelePos=201 total len = 401 SNP=M chr8 | SEQ ID NO:1223 |
| >SNP8NRG1320889_allelePos=20l total len = 401 SNP=Y chr8 | SEQ ID NO:1224 |
| >SNP8NRG1320895_allelePos=201 total len = 401 SNP=Y chr8 | SEQ ID NO:1225 |
| >SNP8NRG1321251_allelePos=201 total len = 401 SNP=R chr8 | SEQ ID NO:1226 |
| >SNP8NRG1321508_allelePos=201 total len = 401 SNP=R chr8 | SEQ ID NO:1227 |
| >SNP8NRG1321634_allelePos=201 total len = 401 SNP=W chr8 | SEQ ID NO:1228 |
| >SNP8NRG1321737_allelePos=201 total len = 401 SNP=Y chr8 | SEQ ID NO:1229 |
| >SNP8NRG1322161_allelePos=201 total len = 401 SNP=R chr8 | SEQ ID NO:1230 |
| >SNP8NRG1324356_allelePos=201 total len = 401 SNP=R chr8 | SEQ ID NO:1231 |
| >SNP8NRG1324963_allelePos=201 total len = 401 SNP=Y chr8 | SEQ ID NO:1232 |
| >SNP8NRG1325396_allelePos=201 total len = 401 SNP=R chr8 | SEQ ID NO:1233 |
| >SNP8NRG1326212_allelePos=201 total len = 401 SNP=Y chr8 | SEQ ID NO:1234 |
| >SNP8NRG1326510_allelePos=201 total len = 401 SNP=R chr8 | SEQ ID NO:1235 |
| >SNP8NRG1327154_allelePos=201 total len = 401 SNP=M chr8 | SEQ ID NO:1236 |
| >SNP8NRG1327266_allelePos=201 total len = 401 SNP=Y chr8 | SEQ ID NO:1237 |
| >SNP8NRG1328880_allelePos=201 total len = 401 SNP=K chr8 | SEQ ID NO:1238 |
| >SNP8NRG1330525_allelePos=201 total len = 401 SNP=R chr8 | SEQ ID NO:1239 |
| >SNP8NRG1330554_allelePos=201 total len = 401 SNP=S chr8 | SEQ ID NO:1240 |
| >SNP8NRG1330689_allelePos=201 total len = 401 SNP=R chr8 | SEQ ID NO:1241 |
| >SNP8NRG1331283_allelePos=201 total len = 401 SNP=Y chr8 | SEQ ID NO:1242 |
| >SNP8NRG1332146_allelePos=201 total len = 401 SNP=R chr8 | SEQ ID NO:1243 |
| >SNP8NRG1333911_allelePos=201 total len = 401 SNP=Y chr8 | SEQ ID NO:1244 |
| >SNP8NRG1334849_allelePos=201 total len = 401 SNP=R chr8 | SEQ ID NO:1245 |
| >SNP8NRG1335876_allelePos=201 total len = 401 SNP=W chr8 | SEQ ID NO:1246 |
| >SNP8NRG1336199_allelePos=201 total len = 401 SNP=S chr8 | SEQ ID NO:1247 |
| >SNP8NRG1336412_allelePos=201 total len = 401 SNP=Y chr8 | SEQ ID NO:1248 |
| >SNP8NRG1336584_allelePos=201 total len = 401 SNP=R chr8 | SEQ ID NO:1249 |
| >SNP8NRG1337276_allelePos=201 total len = 401 SNP=M chr8 | SEQ ID NO:1250 |
| >SNP8NRG1337281_allelePos=201 total len = 401 SNP=W chr8 | SEQ ID NO:1251 |
| >SNP8NRG1337854_allelePos=201 total len = 401 SNP=R chr8 | SEQ ID NO:1252 |
| >SNP8NRG1338477_allelePos=201 total len = 401 SNP=R chr8 | SEQ ID NO:1253 |
| >SNP8NRG1341468_allelePos=201 total len = 401 SNP=R chr8 | SEQ ID NO:1254 |
| >SNP8NRG1341762_allelePos=201 total len = 401 SNP=R chr8 | SEQ ID NO:1255 |
| >SNP8NRG1343290_allelePos=201 total len = 401 SNP=R chr8 | SEQ ID NO:1256 |
| >SNP8NRG1346901_allelePos=201 total len = 401 SNP=Y chr8 | SEQ ID NO:1257 |
| >SNP8NRG1350636_allelePos=201 total len = 401 SNP=R chr8 | SEQ ID NO:1258 |
| >SNP8NRG1350705_allelePos=201 total len = 401 SNP=S chr8 | SEQ ID NO:1259 |
| >SNP8NRG1350738_allelePos=201 total len = 401 SNP=R chr8 | SEQ ID NO:1260 |
| >SNP8NRG1352895_allelePos=201 total len = 401 SNP=R chr8 | SEQ ID NO:1261 |
| >SNP8NRG1352946_allelePos=201 total len = 401 SNP=Y chr8 | SEQ ID NO:1262 |
| >SNP8NRG1354585_allelePos=201 total len = 401 SNP=W chr8 | SEQ ID NO:1263 |
| >SNP8NRG1356043_allelePos=201 total len = 401 SNP=M chr8 | SEQ ID NO:1264 |
| >SNP8NRG1357410_allelePos=201 total len = 401 SNP=R chr8 | SEQ ID NO:1265 |
| >SNP8NRG1357630_allelePos=201 total len = 401 SNP=M chr8 | SEQ ID NO:1266 |
| >SNP8NRG1357743_allelePos=201 total len = 401 SNP=W chr8 | SEQ ID NO:1267 |
| >SNP8NRG1357786_allelePos=201 total len = 401 SNP=K chr8 | SEQ ID NO:1268 |
| >SNP8NRG1357874_allelePos=201 total len = 401 SNP=K chr8 | SEQ ID NO:1269 |
| >SNP8NRG1358798_allelePos=201 total len = 401 SNP=S chr8 | SEQ ID NO:1270 |
| >SNP8NRG1359095_allelePos=201 total len = 401 SNP=W chr8 | SEQ ID NO:1271 |
| >SNP8NRG1359576_allelePos=201 total len = 401 SNP=R chr8 | SEQ ID NO:1272 |
| >SNP8NRG1473356_allelePos=201 total len = 401 SNP=R chr8 | SEQ ID NO:1273 |
| >SNP8NRG1473576_allelePos=201 total len = 401 SNP=S chr8 | SEQ ID NO:1274 |
| >SNP8NRG1473605_allelePos=201 total len = 401 SNP=S chr8 | SEQ ID NO:1275 |
| >SNP8NRG1473982_allelePos=201 total len = 401 SNP=K chr8 | SEQ ID NO:1276 |
| >SNP8NRG1473988_allelePos=201 total len = 401 SNP=K chr8 | SEQ ID NO:1277 |
| >SNP8NRG1474075_allelePos=201 total len = 401 SNP=Y chr8 | SEQ ID NO:1278 |
| >SNP8NRG1476474_allelePos=201 total len = 401 SNP=Y chr8 | SEQ ID NO:1279 |
| >SNP8NRG1476769_allelePos=201 total len = 401 SNP=R chr8 | SEQ ID NO:1280 |
| >SNP8NRG1476774_allelePos=201 total len = 401 SNP=R chr8 | SEQ ID NO:1281 |
| >SNP8NRG1477042_allelePos=201 total len = 401 SNP=K chr8 | SEQ ID NO:1282 |
| >SNP8NRG1477118_allelePos=201 total len = 401 SNP=K chr8 | SEQ ID NO:1283 |
| >SNP8NRGd131E1006 allelePos=31 total len = 60 SNP=r chr8 | SEQ ID NO:1284 |
| (245747-245807) | |
| >SNP8NRGd222E1006 allelePos=31 total len = 60 SNP=r chr8 | SEQ ID NO:1285 |
| (245838-245898) | |
| >SNP8NRGd279E1006 allelePos=31 total len = 60 SNP=r chr8 | SEQ ID NO:1286 |
| (245895-245955) | |
| >SNP8NRGd606E1006 allelePos=31 total len = 60 SNP=k chr8 | SEQ ID NO:1287 |
| (246222-246282) | |
| >SNP8NRGu865E92 allelePos=31 total len = 60 SNP=k chr8 | SEQ ID NO:1288 |
| (825115-825173) | |
| >SNP8NRGu3E46 allelePos=31 total len = 60 SNP=k chr8 | SEQ ID NO:1289 |
| (826277-826336) | |
| >SNP8NRGd68E46 allelePos=31 total len = 60 SNP=r chr8 | SEQ ID NO:1290 |
| (826393-826453) | |
| >SNP8NRGd198E46 allelePos=31 total len = 60 SNP=y chr8 | SEQ ID NO:1291 |
| (826523-826583) | |
| >SNP8NRG991707 allelePos=31 total len = 60 SNP=y chr8 | SEQ ID NO:1292 |
| (994608-994668) | |
| >SNP8NRG1098566 allelePos=31 total len = 60 SNP=k chr8 | SEQ ID NO:1293 |
| (1101477-1101537) | |
| >SNP8NRG1098567 allelePos=32 total len = 60 SNP=y chr8 | SEQ ID NO:1294 |
| (1101477-1101537) | |
| >SNP8NRG1098745 allelePos=29 total len = 60 SNP=k chr8 | SEQ ID NO:1295 |
| (1101653-1101713) | |
| >SNP8NRG1098765 allelePos=31 total len = 60 SNP=y chr8 | SEQ ID NO:1296 |
| (1101671-1101731) | |
| >SNP8NRGu28E592 allelePos=30 total len = 60 SNP=r chr8 | SEQ ID NO:1297 |
| (1153236-1153296) | |
| >SNP8NRGu29E592 allelePos=31 total len = 60 SNP=r chr8 | SEQ ID NO:1298 |
| (1153236-1153296) | |
| >SNP8NRGu30E592 allelePos=32 total len = 60 SNP=r chr8 | SEQ ID NO:1299 |
| (1153236-1153296) | |
| >SNP8NRGd38E592 allelePos=31 total len = 60 SNP=y chr8 | SEQ ID NO:1300 |
| (1153894-1153954) | |
| >SNP8NRGd103E592 allelePos=31 total len = 60 SNP=s chr8 | SEQ ID NO:1301 |
| (1153959-1154019) | |
| >SNP8NRGd162E592 allelePos=31 total len = 60 SNP=s chr8 | SEQ ID NO:1302 |
| (1154018-1154078) | |
| >SNP8NRGd205E592 allelePos=31 total len = 60 SNP=r chr8 | SEQ ID NO:1303 |
| (1154061-1154122) | |
| >SNP8NRGd258E592 allelePos=30 total len = 60 SNP=y chr8 | SEQ ID NO:1304 |
| (1154115-1154174) | |
| >SNP8NRGu111E51b allelePos=33 total len = 60 SNP=y chr8 | SEQ ID NO:1305 |
| (1221721-1221784) | |
| >SNP8NRGu77E290 allelePos=31 total len = 60 SNP=k chr8 | SEQ ID NO:1306 |
| (1326675-1326735) | |
| >SNP8NRGd86E290 allelePos=31 total len = 60 SNP=y chr8 | SEQ ID NO:1307 |
| (1327127-1327187) | |
| >SNP8NRGd126E290 allelePos=31 total len = 60 SNP=s chr8 | SEQ ID NO:1308 |
| (1327167-1327227) | |
| >SNP8NRGu135E131 allelePos=31 total len = 60 SNP=r chr8 | SEQ ID NO:1309 |
| (1364198-1364258) | |
| >SNP8Ad1163E1006 allelePos=31 total len = 60 SNP=y chr8 | SEQ ID NO:1310 |
| (246779-246839) | |
| >SNP8NRGu5E207 allelePos=31 total len = 60 SNP=y chr8 | SEQ ID NO:1311 |
| (1365222-1365285) | |
| >SNP8NRG1AGu48E38 allelePos=31 total len = 60 SNP=r chr8 | SEQ ID NO:1312 |
| (631205-631265) | |
| >SNP8NRG1AGu45E38 allelePos=31 total len = 60 SNP=s chr8 | SEQ ID NO:1313 |
| (631208-631268) | |
| >SNP8NRG1AGd148E262 allelePos=31 total len = 60 SNP=w chr8 | SEQ ID NO:1314 |
| (744556-744616) | |
| >SNP8NRG21339 allelePos=31 total len = 60 SNP=M chr8 | SEQ ID NO:1315 |
| >SNP8NRG106058 allelePos=31 total len = 60 SNP=R chr8 | SEQ ID NO:1316 |
| >SNP8NRG107156 allelePos=31 total len = 60 SNP=R chr8 | SEQ ID NO:1317 |
| >SNP8NRG110796 allelePos=31 total len = 60 SNP=K chr8 | SEQ ID NO:1318 |
| >SNP8NRG130911 allelePos=31 total len = 60 SNP=R chr8 | SEQ ID NO:1319 |
| >SNP8NRG138389 allelePos=31 total len = 60 SNP=Y chr8 | SEQ ID NO:1320 |
| >SNP8NRG156534 allelePos=31 total len = 60 SNP=R chr8 | SEQ ID NO:1321 |
| >SNP8NRG156840 allelePos=31 total len = 60 SNP=Y chr8 | SEQ ID NO:1322 |
| >SNP8NRG224932 allelePos=31 total len = 60 SNP=R chr8 | SEQ ID NO:1323 |
| >SNP8NRG225178 allelePos=31 total len = 60 SNP=R chr8 | SEQ ID NO:1324 |
| >SNP8NRG225182 allelePos=35 total len = 60 SNP=Y chr8 | SEQ ID NO:1325 |
| >SNP8NRG226107 allelePos=31 total len = 60 SNP=Y chr8 | SEQ ID NO:1326 |
| >SNP8NRG226372 allelePos=31 total len = 60 SNP=Y chr8 | SEQ ID NO:1327 |
| >SNP8NRG228755 allelePos=31 total len = 60 SNP=Y chr8 | SEQ ID NO:1328 |
| >SNP8NRG229765 allelePos=31 total len = 60 SNP=Y chr8 | SEQ ID NO:1329 |
| >SNP8NRG229820 allelePos=31 total len = 60 SNP=Y chr8 | SEQ ID NO:1330 |
| >SNP8NRG230727 allelePos=31 total len = 60 SNP=K chr8 | SEQ ID NO:1331 |
| >SNP8NRG232445 allelePos=31 total len = 60 SNP=Y chr8 | SEQ ID NO:1332 |
| >SNP8NRG345545 allelePos=31 total len = 60 SNP=R chr8 | SEQ ID NO:1333 |
| >SNP8NRG380850 allelePos=31 total len = 60 SNP=K chr8 | SEQ ID NO:1334 |
| >SNP8NRG381288 allelePos=31 total len = 60 SNP=K chr8 | SEQ ID NO:1335 |
| >SNP8NRG381409 allelePos=31 total len = 60 SNP=R chr8 | SEQ ID NO:1336 |
| >SNP8NRG383073 allelePos=31 total len = 60 SNP=W chr8 | SEQ ID NO:1337 |
| >SNP8NRG391764 allelePos=31 total len = 60 SNP=Y chr8 | SEQ ID NO:1338 |
| >SNP8NRG393090 allelePos=31 total len = 60 SNP=Y chr8 | SEQ ID NO:1339 |
| >SNP8NRG397703 allelePos=31 total len = 60 SNP=M chr8 | SEQ ID NO:1340 |
| >SNP8NRG686849 allelePos=31 total len = 60 SNP=R chr8 | SEQ ID NO:1341 |
| >SNP8NRG690807 allelePos=31 total len = 60 SNP=R chr8 | SEQ ID NO:1342 |
| >SNP8NRG696489 allelePos=31 total len = 60 SNP=M chr8 | SEQ ID NO:1343 |
| >SNP8NRG701248 allelePos=31 total len = 60 SNP=M chr8 | SEQ ID NO:1344 |
| >SNP8NRG701526 allelePos=31 total len = 60 SNP=M chr8 | SEQ ID NO:1345 |
| >SNP8NRG701944 allelePos=31 total len = 60 SNP=S chr8 | SEQ ID NO:1346 |
| >SNP8NRG712601 allelePos=31 total len = 60 SNP=Y chr8 | SEQ ID NO:1347 |
| >SNP8NRG727336 allelePos=31 total len = 60 SNP=S chr8 | SEQ ID NO:1348 |
| >SNP8NRG807447 allelePos=31 total len = 60 SNP=R chr8 | SEQ ID NO:1349 |
| >SNP8NRG809147 allelePos=31 total len = 60 SNP=K chr8 | SEQ ID NO:1350 |
| >SNP8NRG809290 allelePos=31 total len = 60 SNP=Y chr8 | SEQ ID NO:1351 |
| >SNP8NRG810522 allelePos=31 total len = 60 SNP=K chr8 | SEQ ID NO:1352 |
| >SNP8NRG814838 allelePos=31 total len = 60 SNP=W chr8 | SEQ ID NO:1353 |
| >SNP8NRG818760 allelePos=31 total len = 60 SNP=R chr8 | SEQ ID NO:1354 |
| >SNP8NRG819991 allelePos=31 total len = 60 SNP=K chr8 | SEQ ID NO:1355 |
| >SNP8NRG834637 allelePos=31 total len = 60 SNP=Y chr8 | SEQ ID NO:1356 |
| >SNP8NRG840560 allelePos=31 total len = 60 SNP=Y chr8 | SEQ ID NO:1357 |
| >SNP8NRG1047074 allelePos=31 total len = 60 SNP=S chr8 | SEQ ID NO:1358 |
| >SNP8NRG1076729 allelePos=31 total len = 60 SNP=K chr8 | SEQ ID NO:1359 |
| >SNP8NRG1083409 allelePos=28 total len = 53 SNP=R chr8 | SEQ ID NO:1360 |
| >SNP8NRG1089867 allelePos=31 total len = 60 SNP=Y chr8 | SEQ ID NO:1361 |
| >SNP8NRG1098094 allelePos=30 total len = 60 SNP=S chr8 | SEQ ID NO:1362 |
| >SNP8NRG1103650 allelePos=27 total len = 60 SNP=R chr8 | SEQ ID NO:1363 |
| >SNP8NRG1111202 allelePos=31 total len = 60 SNP=K chr8 | SEQ ID NO:1364 |
| >SNP8NRG1283935 allelePos=32 total len = 60 SNP=K chr8 | SEQ ID NO:1365 |
| >SNP8NRG257738 allelePos=53 total len = 89 SNP=Y chr8 | SEQ ID NO:1366 |
| >SNP8NRGu42E127_AP301_Len558_chr8 SNP=R | SEQ ID NO:1367 |
| (1361122-1361679) | |
| >SNP8NRGu27E127_AP316_Len558_chr8 SNP= | SEQ ID NO:1368 |
| (1361122-1361679) | |
| >SNP8NRGu865E92_AP263_Len554_chr8 SNP=K | SEQ ID NO:1369 |
| (824883-825436) | |
| >SNP8NRG220954_AP201_LEN401_chr8 SNP=Y | SEQ ID NO:1370 |
| >SNP8NRG221067_AP201_LEN401_chr8 SNP=Y | SEQ ID NO:1371 |
| >SNP8NRG221132_AP201_LEN401_chr8 SNP=R | SEQ ID NO:1372 |
| >SNP8NRG221533_AP201_LEN401_chr8 SNP=Y | SEQ ID NO:1373 |
| >SNP8NRG221589_AP201_LEN40I_chr8 SNP=Y | SEQ ID NO:1374 |
| v) Insertions/deletions in the 1.5 Mb sequence: | |
| >SNP8NRG85307del25 (84970-85394) | SEQ ID NO:1375 |
| >SNP8NRGd120E13L (1364356-1364755) | SEQ ID NO:1376 |
| >SNP8NRGdel314 (1107324-1107723) | SEQ ID NO:1377 |
| >DNP8NRG1 (6759-7159) | SEQ ID NO:1378 |
| >DNP8NRG2 (6775-7178) | SEQ ID NO:1379 |
| >DNP8NRG3 (6855-7255) | SEQ ID NO:1380 |
| >DNP8NRG4 (9329-9733) | SEQ ID NO:1381 |
| >DNP8NRG5 (36908-37303) | SEQ ID NO:1382 |
| >DNP8NRG6 (36925-37320) | SEQ ID NO:1383 |
| >DNP8NRG7 (36936-37331) | SEQ ID NO:1384 |
| >DNP8NRG8 (36948-37343) | SEQ ID NO:1385 |
| >DNP8NRG9 (36952-37344) | SEQ ID NO:1386 |
| >DNP8NRG10 (37941-38350) | SEQ ID NO:1387 |
| >DNP8NRG11 (41138-41537) | SEQ ID NO:1388 |
| >DNP8NRG12 (45993-46442) | SEQ ID NO:1389 |
| >DNP8NRG13 (62105-62516) | SEQ ID NO:1390 |
| >DNP8NRG14 (69092-69491) | SEQ ID NO:1391 |
| >DNP8NRG15 (71515-71918) | SEQ ID NO:1392 |
| >DNP8NRG16 (86127-86527) | SEQ ID NO:1393 |
| >DNP8NRG17 (90190-90590) | SEQ ID NO:1394 |
| >DNP8NRG18 (93184-93587) | SEQ ID NO:1395 |
| >DNP8NRG19 (99076-99501) | SEQ ID NO:1396 |
| >DNP8NRG20 (102514-102917) | SEQ ID NO:1397 |
| >DNP8NRG21 (107441-107841) | SEQ ID NO:1398 |
| >DNP8NRG22 (109137-109541) | SEQ ID NO:1399 |
| >DNP8NRG23 109636-110040) | SEQ ID NO:1400 |
| >DNP8NRG24 (111743-112118) | SEQ ID NO:1401 |
| >DNP8NRG25 (127196-127609) | SEQ ID NO:1402 |
| >DNP8NRG26 (134509-134908) | SEQ ID NO:1403 |
| >DNP8NRG27 (135198-135602) | SEQ ID NO:1404 |
| >DNP8NRG28 136821-152899) | SEQ ID NO:1405 |
| >DNP8NRG29 (168772-169175) | SEQ ID NO:1406 |
| >DNP8NRG30 (232615-233018) | SEQ ID NO:1407 |
| >DNP8NRG31 (237553-237958) | SEQ ID NO:1408 |
| >DNP8NRG32 (375355-375754) | SEQ ID NO:1409 |
| >DNP8NRG33 (375514-375917) | SEQ ID NO:1410 |
| >DNP8NRG34 (401168-401570) | SEQ ID NO:1411 |
| >DNP8NRG35 (428883-429290) | SEQ ID NO:1412 |
| >DNP8NRG36 447398-447801) | SEQ ID NO:1413 |
| >DNP8NRG37 (480801-481205) | SEQ ID NO:1414 |
| >DNP8NRG38 (529910-530309) | SEQ ID NO:1415 |
| >DNP8NRG39 (548278-548677) | SEQ ID NO:1416 |
| >DNP8NRG40ca4 (551356-551755) | SEQ ID NO:1417 |
| >DNP8NRG41 (552710-553112) | SEQ ID NO:1418 |
| >DNP8NRG42 (562788-563199) | SEQ ID NO:1419 |
| >DNP8NRG43 (564544-564942) | SEQ ID NO:1420 |
| >DNP8NRG44 (564584-564987) | SEQ ID NO:1421 |
| >DNP8NRG45 (592084-592487) | SEQ ID NO:1422 |
| >DNP8NRG46 (594011-594419) | SEQ ID NO:1423 |
| >DNP8NRG47 (596069-596536) | SEQ ID NO:1424 |
| >DNP8NRG48 (599427-599827) | SEQ ID NO:1425 |
| >DNP8NRG49 (680422-680847) | SEQ ID NO:1426 |
| >DNP8NRG50 (685526-685929) | SEQ ID NO:1427 |
| >DNP8NRG51 (686532-686956) | SEQ ID NO:1428 |
| >DNP8NRG52 (692241-692640) | SEQ ID NO:1429 |
| >DNP8NRG53_AAGAGGGCCTG_replaced (702892-703303) | SEQ ID NO: 1430 |
| >DNP8NRG54 (711819-712221) | SEQ ID NO:1431 |
| >DNP8NRG55 711992-712392) | SEQ ID NO:1432 |
| >DNP8NRG56 (746307-746708) | SEQ ID NO:1433 |
| >DNP8NRG57 (746391-746791) | SEQ ID NO:1434 |
| >DNP8NRG58 (746418-746819) | SEQ ID NO:1435 |
| >DNP8NRG59 (781373-781773) | SEQ ID NO:1436 |
| >DNP8NRG60 (814481-814900) | SEQ ID NO:1437 |
| >DNP8NRG61 (821982-822389) | SEQ ID NO:1438 |
| >DNP8NRG62 (835563-835962) | SEQ ID NO:1439 |
| >DNP8NRG63 (838331-838731) | SEQ ID NO:1440 |
| >DNP8NRG64 (839998-840404) | SEQ ID NO:1441 |
| >DNP8NRG65 (885543-885946) | SEQ ID NO:1442 |
| >DNP8NRG66 (885952-886368) | SEQ ID NO:1443 |
| >DNP8NRG67 (886899-887299) | SEQ ID NO:1444 |
| >DNP8NRG68 (889323-889727) | SEQ ID NO:1445 |
| >DNP8NRG69 (907972-908371) | SEQ ID NO:1446 |
| >DNP8NRG70 (908004-908409) | SEQ ID NO:1447 |
| >DNP8NRG71 (912248-912651) | SEQ ID NO:1448 |
| >DNP8NRG72 (916934-917324) | SEQ ID NO:1449 |
| >DNP8NRG73 (916938-917324) | SEQ ID NO:1450 |
| >DNP8NRG74 (917136-917540) | SEQ ID NO:1451 |
| >DNP8NRG75 (921592-921996) | SEQ ID NO:1452 |
| >DNP8NRG76 (937564-937968) | SEQ ID NO:1453 |
| >DNP8NRG77 (942470-942869) | SEQ ID NO:1454 |
| >DNP8NRG78 (969787-970195) | SEQ ID NO:1455 |
| >DNP8NRG79 971497-971910) | SEQ ID NO:1456 |
| >DNP8NRG80 (976829-977234) | SEQ ID NO:1457 |
| >DNP8NRG81 (994598-995046) | SEQ ID NO:1458 |
| >DNP8NRG82 (1008128-1008529) | SEQ ID NO:1459 |
| >DNP8NRG83 (1017221-1017622) | SEQ ID NO:1460 |
| >DNP8NRG84 (1017253-1017654) | SEQ ID NO:1461 |
| >DNP8NRG8S (1023202-1023604) | SEQ ID NO:1462 |
| >DNP8NRG86 (1026814-1027220) | SEQ ID NO:1463 |
| >DNP8NRG87 (1057535-1057938) | SEQ ID NO:1464 |
| >DNP8NRG88 (1059443-1059843) | SEQ ID NO:1465 |
| >DNP8NRG89 (1060750-1061151) | SEQ ID NO:1466 |
| >DNP8NRG90 (1060754-1061154) | SEQ ID NO:1467 |
| >DNP8NRG91 (1069634-1070038) | SEQ ID NO:1468 |
| >DNP8NRG92 (1073580-1073983) | SEQ ID NO:1469 |
| >DNP8NRG93 (1079328-1079731) | SEQ ID NO:1470 |
| >DNP8NRG94 (1079341-1079742) | SEQ ID NO:1471 |
| >DNP8NRG95_GTG_replaced (1079520-1079922) | SEQ ID NO:1472 |
| >DNP8NRG96 (1080309-1080716) | SEQ ID NO:1473 |
| >DNP8NRG97 (1101462-1101859) | SEQ ID NO:1474 |
| >DNP8NRG98 (1103451-1103850) | SEQ ID NO:1475 |
| >DNP8NRG99 (1113942-1114351) | SEQ ID NO:1476 |
| >DNP8NRG100 (1116221-1116620) | SEQ ID NO:1477 |
| >DNP8NRG101 (1258787-1259186) | SEQ ID NO:1478 |
| >DNP8NRG102 (1301482-1301881) | SEQ ID NO:1479 |
| >DNP8NRG103 (1308262-1308663) | SEQ ID NO:1480 |
| >DNP8NRG104 (1311397-1311797) | SEQ ID NO:1481 |
| >DNP8NRG105 (1311400-1311800) | SEQ ID NO:1482 |
| >DNP8NRG106 (1330322-1330722) | SEQ ID NO:1483 |
| >DNP8NRG107 (1348406-1348821) | SEQ ID NO:1484 |
| >DNP8NRG108 (825939-826341) | SEQ ID NO:1485 |
| >DNP8NRG109 (18032-18432) | SEQ ID NO:1486 |
| >DNP8NRG110 (125397-125796) | SEQ ID NO:1487 |
| >DNP8NRG111 (129763-130163) | SEQ ID NO:1488 |
| >DNP8NRG112 (130279-130681) | SEQ ID NO:1489 |
| >DNP8NRG113 (138522-138923) | SEQ ID NO:1490 |
| >DNP8NRG114 (141659-142057) | SEQ ID NO:1491 |
| >DNP8NRG115 (162344-162743) | SEQ ID NO:1492 |
| >DNP8NRG116 (177349-177753) | SEQ ID NO:1493 |
| >DNP8NRG117 (179402-179802) | SEQ ID NO:1494 |
| >DNP8NRG118 (190444-190846) | SEQ ID NO:1495 |
| >DNP8NRG119 (193592-193993) | SEQ ID NO:1496 |
| >DNP8NRG120 (234109-234510) | SEQ ID NO:1497 |
| >DNP8NRG121 (384180-384580) | SEQ ID NO:1498 |
| >DNP8NRG122 (677776-678175) | SEQ ID NO:1499 |
| >DNP8NRG123 (680065-680464) | SEQ ID NO:1500 |
| >DNP8NRG124 (688548-688948) | SEQ ID NO:1501 |
| >DNP8NRG125 (693295-693694) | SEQ ID NO:1502 |
| >DNP8NRG126 (696051-696450) | SEQ ID NO:1503 |
| >DNP8NRG127 (699611-700011) | SEQ ID NO:1504 |
| >DNP8NRG128 (706257-706657) | SEQ ID NO:1505 |
| >DNP8NRG129 (807981-808380) | SEQ ID NO:1506 |
| >DNP8NRG130 (810704-811104) | SEQ ID NO:1507 |
| >DNP8NRG131 (819430-819831) | SEQ ID NO:1508 |
| >DNP8NRG132 (826566-826964) | SEQ ID NO:1509 |
| >DNP8NRG133 (844056-844456) | SEQ ID NO:1510 |
| >DNP8NRG134 (846499-846898) | SEQ ID NO:1511 |
| >DNP8NRG135 (959196-959597) | SEQ ID NO:1512 |
| >DNP8NRG136 (959602-960002) | SEQ ID NO:1513 |
| >DNP8NRG137 (961294-961694) | SEQ ID NO:1514 |
| >DNP8NRG138 (962538-962940) | SEQ ID NO:1515 |
| >DNP8NRG139 (963178-963579) | SEQ ID NO:1516 |
| >DNP8NRG140 (968885-969286) | SEQ ID NO:1517 |
| >DNP8NRG141 (1074891-1075295) | SEQ ID NO:1518 |
| >DNP8NRG142 (1083125-1083524) | SEQ ID NO:1519 |
| >DNP8NRG143 (1088956-1089356) | SEQ ID NO:1520 |
| >DNP8NRG144 (1089985-1090384) | SEQ ID NO:1521 |
| >DNP8NRG145 (1091481-1091880) | SEQ ID NO:1522 |
| >DNP8NRG146 (1097289-1097688) | SEQ ID NO:1523 |
| >DNP8NRG147 (1266466-126686) | SEQ ID NO:1524 |
| >DNP8NRG148 (1277599-1277999) | SEQ ID NO:1525 |
| >DNP8NRG149 (114359-114760) | SEQ ID NO:1526 |
| >DNP8NRG150 (115359-115758) | SEQ ID NO:1527 |
| >DNP8NRG151 (681200-681599) | SEQ ID NO:1528 |
| >DNP8NRG152 (1085352-1085751) | SEQ ID NO:1529 |
| >DNP8NRG153 (1275551-1275950) | SEQ ID NO:1530 |
| >DNP8NRG154 (1276873-1277273) | SEQ ID NO:1531 |

[0240] TABLE 3

| | |
|---|---|
| SNPs and Markers | SEQ ID NO: |

| | |
|---|---|
| SNP8NRG102266_allelePos=201 total len = 401 SNP=R chr8 | SEQ ID NO: 1532 |
| SNP8NRG103492_allelePos=201 total len = 401 SNP=K chr8 | SEQ ID NO: 1533 |
| SNP8NRG126796_allelePos=201 total len = 401 SNP=X(del) chr8 | SEQ ID NO: 1534 |
| SNP8NRG126990_allelePos=201 total len = 401 SNP=X(del) chr8 | SEQ ID NO: 1535 |
| SNP8NRG131197_allelePos=201 total len = 403 SNP=X(del) chr8 | SEQ ID NO: 1536 |
| SNP8NRG157747_allelePos=201 total len = 401 SNP=W chr8 | SEQ ID NO: 1537 |
| SNP8NRG240979_allelePos=201 total len = 401 SNP=R chr8 | SEQ ID NO: 1538 |
| SNP8NRG241017_allelePos=201 total len = 401 SNP=R chr8 | SEQ ID NO: 1539 |
| SNP8NRG241942_allelePos=201 total len = 401 SNP=W chr8 | SEQ ID NO: 1540 |
| SNP8NRG242526_allelePos=201 total len = 401 SNP=M chr8 SEQ ID NO: 1541 | |
| SNP8NRG242556_allelePos=201 total len = 401 SNP=Y chr8 | SEQ ID NO: 1542 |
| SNP8NRG242969_allelePos=201 total len = 401 SNP=R chr8 | SEQ ID NO: 1543 |
| SNP8NRGU1136E144_allelePos=201 total len = 401 SNP=W chr8 | SEQ ID NO: 1544 |
| SNP8NRGU948E144_allelePos=201 total len = 401 SNP=Y chr8 | SEQ ID NO: 1545 |
| SNP8NRGU798E144_allelePos=201 total len = 401 SNP=K chr8 | SEQ ID NO: 1546 |
| SNP8NRGU790E144_allelePos=201 total len = 401 SNP=R chr8 | SEQ ID NO: 1547 |
| SNP8NRGU690E144_allelePos=201 total len = 401 SNP=W chr8 | SEQ ID NO: 1548 |
| NRG1 exon | |
| E1006A | SEQ ID NO: 1549 |
| SNP8NRG1K250E1006_allelePos=201 total len = 401 SNP=K chr8 | SEQ ID NO: 1550 |
| SNP8NRGR573E1006_allelePos=201 total len = 401 SNP=R chr8 | SEQ ID NO: 1551 |
| SNP8NRGY672E1006_allelePos=201 total len = 401 SNP=Y chr8 | SEQ ID NO: 1552 |
| SNP8NRGR676E1006_allelePos=201 total len = 401 SNP=Y chr8 | SEQ ID NO: 1553 |
| SNP8NRGY734E1006_allelePos=201 total len = 401 SNP=Y chr8 | SEQ ID NO: 1554 |
| SNP8NRGYD16E1006_allelePos=201 total len = 401 SNP=Y chr8 | SEQ ID NO: 1555 |
| SNP8NRGYD29E1006_allelePos=201 total len = 401 SNP=Y chr8 | SEQ ID NO: 1556 |
| SNP8NRGRD145E1006_allelePos=201 total len = 401 SNP=R chr8 | SEQ ID NO: 1557 |
| SNP8NRG247229_allelePos=201 total len = 401 SNP=Y chr8 | SEQ ID NO: 1558 |
| SNP8NRG307561_allelePos=201 total len = 401 SNP=R chr8 | SEQ ID NO: 1559 |
| SNP8NRG385093_allelePos=201 total len = 401 SNP=R chr8 | SEQ ID NO: 1560 |
| SNP8NRG426304_allelePos=201 total len = 401 SNP=R chr8 | SEQ ID NO: 1561 |
| TSC0749797_allelePos=201 total len = 401 SNP=Y chr8 | SEQ ID NO: 1562 |
| TSC0567738_allelePos=201 total len = 401 SNP=R chr8 | SEQ ID NO: 1563 |
| TSC0287246_allelePos=201 total len = 401 SNP=R chr8 | SEQ ID NO: 1564 |
| SNP8NRG449328_allelePos=201 total len = 401 SNP=Y chr8 | SEQ ID NO: 1565 |
| SNP8NRG449661_allelePos=201 total len = 401 SNP=Y chr8 | SEQ ID NO: 1566 |
| TSC0547311_allelePos=201 total len = 401 SNP=S chr8 | SEQ ID NO: 1567 |
| SNP8NRG552169_allelePos=201 total len = 401 SNP=Y chr8 | SEQ ID NO: 1568 |
| SNP8NRG552416_allelePos=201 total len = 401 SNP=X chr8 | SEQ ID NO: 1569 |
| SNP8NRG593202_allelePos=201 total len = 401 SNP=R chr8 | SEQ ID NO: 1570 |
| SNP8NRG652833_allelePos=201 total len = 401 SNP=R chr8 | SEQ ID NO: 1571 |
| SNP8NRG657415_allelePos=201 total len = 401 SNP=S chr8 | SEQ ID NO: 1572 |
| TSC0543535_allelePos=201 total len = 401 SNP=R chr8 | SEQ ID NO: 1573 |
| SNP8NRG666856_allelePos=201 total len = 401 SNP=Y chr8 | SEQ ID NO: 1574 |
| SNP8NRG729427_allelePos=201 total len = 401 SNP=K chr8 | SEQ ID NO: 1575 |
| SNP8NRG730825_allelePos=201 total len = 401 SNP=R chr8 | SEQ ID NO: 1576 |
| SNP8NRG730877_allelePos=201 total len = 401 SNP=W chr8 | SEQ ID NO: 1577 |
| SNP8NRG730878_allelePos=201 total len = 401 SNP=W chr8 | SEQ ID NO: 1578 |
| SNP8NRG821066_allelePos=201 total len = 401 SNP=R chr8 | SEQ ID NO: 1579 |
| SNP8NRG821268_allelePos=201 total len = 401 SNP=Y chr8 | SEQ ID NO: 1580 |
| SNP8NRG821939_allelePos=201 total len = 401 SNP=Y chr8 | SEQ ID NO: 1581 |
| SNP8NRGU634E92_allelePos=201 total len = 401 SNP=K chr8 | SEQ ID NO: 1582 |
| SNP8NRG822474_allelePos=201 total len = 401 SNP=Y chr8 | SEQ ID NO: 1583 |
| SNP8NRGYU149E92_allelePos=201 total len = 401 SNP=Y chr8 | SEQ ID NO: 1584 |
| SNP8NRGU126E92_allelePos=201 total len = 401 SNP=Y chr8 | SEQ ID NO: 1585 |
| SNP8NRGWU73E92_allelePos=201 total len = 401 SNP=W chr8 | SEQ ID NO: 1586 |
| SNP8NRG823033_allelePos=201 total len = 401 SNP=Y chr8 | SEQ ID NO: 1587 |
| SNP8NRGU56E92_allelePos=201 total len = 401 SNP=W chr8 | SEQ ID NO: 1588 |
| SNP8NRGRU121E48_allelePos=201 total len = 401 SNP=R chr8 | SEQ ID NO: 1589 |
| SNP8NRGU69E46_allelePos=201 total len = 401 SNP=Y chr8 | SEQ ID NO: 1590 |
| SNP8NRG824949_allelePos=201 total len = 401 SNP=Y chr8 | SEQ ID NO: 1591 |
| SNP8NRG825087_allelePos=201 total len = 401 SNP=R chr8 | SEQ ID NO: 1592 |
| SNP8NRGU262E35_allelePos=201 total len = 401 SNP=R chr8 | SEQ ID NO: 1593 |
| SNP8NRG825250_allelePos=201 total len = 401 SNP=R chr8 | SEQ ID NO: 1594 |
| SNP8NRGU183E35_allelePos=201 total len = 401 SNP=Y chr8 | SEQ ID NO: 1595 |
| SNP8NRGU116E35_allelePos=201 total len = 401 SNP=Y chr8 | SEQ ID NO: 1596 |
| SNP8NRGU22E35_allelePos=201 total len = 401 SNP=W chr8 | SEQ ID NO: 1597 |
| SNP8NRGD193E79_allelePos=201 total len = 401 SNP=Y chr8 | SEQ ID NO: 1598 |
| SNP8NRGD401E79_allelePos=201 total len = 401 SNP=K chr8 | SEQ ID NO: 1599 |
| SNP8NRG1116715_allelePos=201 total len = 401 SNP=Y chr8 | SEQ ID NO: 1600 |
| SNP8NRGU1124E592_allelePos=201 total len = 401 SNP=R chr8 | SEQ ID NO: 1601 |
| SNP8NRGU1083E592_allelePos=201 total len = 401 SNP=R chr8 | SEQ ID NO: 1602 |
| SNP8NRGU963E592_allelePos=201 total len = 401 SNP=R chr8 | SEQ ID NO: 1603 |
| SNP8NRGU857E592_allelePos=201 total len = 401 SNP=Y chr8 | SEQ ID NO: 1604 |
| SNP8NRGU406E592_allelePos=201 total len = 401 SNP=M chr8 | SEQ ID NO: 1605 |
| SNP8NRGYD312E592_allelePos=201 total len = 401 SNP=Y chr8 | SEQ ID NO: 1606 |
| SNP8NRG1166872_allelePos=201 total len = 401 SNP=R chr8 | SEQ ID NO: 1607 |
| SNP8NRG1166995_allelePos=201 total len = 401 SNP=Y chr8 | SEQ ID NO: 1608 |
| SNP8NRG1167017_allelePos=201 total len = 401 SNP=K chr8 | SEQ ID NO: 1609 |
| SNP8NRGU193E344_allelePos=201 total len = 401 SNP=R chr8 | SEQ ID NO: 1610 |
| SNP8NRGMD162E122_allelePos=201 total len = 401 SNP=M chr8 | SEQ ID NO: 1611 |
| SNP8NRGD288E122_allelePos=201 total len = 401 SNP=K chr8 | SEQ ID NO: 1612 |
| SNP8NRGU439E51B_allelePos=201 total len = 401 SNP=R chr8 | SEQ ID NO: 1613 |
| SNP8NRGU101E51B_allelePos=201 total len = 401 SNP=S chr8 | SEQ ID NO: 1614 |
| SNP8NRGU59E51B_allelePos=201 total len = 401 SNP=M chr8 | SEQ ID NO: 1615 |
| SNP8NRGU46E51B_allelePos=201 total len = 401 SNP=R chr8 | SEQ ID NO: 1616 |
| SNP8NRGU1714E1160_allelePos=201 total len = 401 SNP=W chr8 | SEQ ID NO: 1617 |
| SNP8NRGU1563E1160_allelePos=201 total len = 401 SNP=R chr8 | SEQ ID NO: 1618 |
| SNP8NRGU1405E1160_allelePos=201 total len = 401 SNP=S chr8 | SEQ ID NO: 1619 |
| SNP8NRGU1388E1160_allelePos=201−2 total len = 402 SNP=X chr8 | SEQ ID NO: 1620 |
| SNP8NRGU344E1160_allelePos=201 total len = 401 SNP=R chr8 | SEQ ID NO: 1621 |
| SNP8NRGU304E1160_allelePos=201−4 total len = 404 SNP=X chr8 | SEQ ID NO: 1622 |
| SNP8NRGKU91E1160_allelePos=201 total len = 401 SNP=K chr8 | SEQ ID NO: 1623 |
| E1160A | SEQ ID NO: 1624 |
| SNP8NRG25E1160_allelePos=201−4 total len = 403 SNP=X chr8 | SEQ ID NO: 1625 |
| SNP8NRG594E1160_allelePos=201 total len = 401 SNP=M chr8 | SEQ ID NO: 1626 |
| SNP8NRGR629E1160_allelePos=201 total len = 401 SNP=R chr8 | SEQ ID NO: 1627 |
| SNP8NRG773E1160_allelePos=201 total len = 401 SNP=R chr8 | SEQ ID NO: 1628 |
| SNP8NRG872E1160_allelePos=201 total len = 401 SNP=S chr8 | SEQ ID NO: 1629 |
| SNP8NRGU1152E290_allelePos=201−5 total len = 405 SNP=X chr8 | SEQ ID NO: 1630 |
| SNP8NRGU162E290_allelePos=201 total len = 401 SNP=R chr8 | SEQ ID NO: 1631 |
| SNP8NRG83E290_allelePos=201−2 total len = 402 SNP=R chr8 | SEQ ID NO: 1632 |
| SNP8NRGD208E290 allelePos=201−4 total len = 404 SNP=X chr8 | SEQ ID NO: 1633 |
| SNP8NRGU70E68_allelePos=201 total len = 401 SNP=R chr8 | SEQ ID NO: 1634 |
| E59A | SEQ ID NO: 1635 |
| SNP8NRG40E59_allelePos=201 total len = 401 SNP=Y chr8 | SEQ ID NO: 1636 |
| SNP8NRG1349775_allelePos=201 total len = 401 SNP=R chr8 | SEQ ID NO: 1637 |
| SNP8NRGU75E24_allelePos=201 total len = 401 SNP=S chr8 | SEQ ID NO: 1638 |
| SNP8NRGU104E127_allelePos=201 total len = 401 SNP=Y chr8 | SEQ ID NO: 1639 |
| SNP8NRGU101E127_allelePos=201 total len = 401 SNP=M chr8 | SEQ ID NO: 1640 |
| SNP8NRGU92E127_allelePos=201 total len = 401 SNP=R chr8 | SEQ ID NO: 1641 |
| SNP8NRGU26E127_allelePos=201 total len = 401 SNP=X chr8 | SEQ ID NO: 1642 |
| SNP8NRGD77E127_allelePos=201 total len = 401 SNP=M chr8 | SEQ ID NO: 1643 |
| SNP8NRGRU37E131_allelePos=201 total len = 401 SNP=R chr8 | SEQ ID NO: 1644 |
| SNP8NRGU4E207_allelePos=201 total len = 401 SNP=R chr8 | SEQ ID NO: 1645 |
| SNP8NRG35E207_allelePos=201 total len = 401 SNP=R chr8 | SEQ ID NO: 1646 |
| E207A | SEQ ID NO: 1647 |
| E846A | SEQ ID NO: 1648 |
| SNP8NRG540E846_allelePos=201 total len = 401 SNP=M chr8 | SEQ ID NO: 1649 |
| SNP8NRG579E846_allelePos=201 total len = 401 SNP=K chr8 | SEQ ID NO: 1650 |
| SNP8NRG671E846_allelePos=201−2 total len = 402 SNP=X chr8 | SEQ ID NO: 1651 |
| SNP8NRGD141E846_allelePos=201 total len = 401 SNP=M chr8 | SEQ ID NO: 1652 |
| SNP8NRG1AGU315E32_allelePos=201 total len = 401 SNP=W chr8 | SEQ ID NO: 1653 |
| SNP8NRG1AGU145E32_allelePos=201 total len = 401 SNP=R chr8 | SEQ ID NO: 1654 |
| SNP8NRG1AGU621E77_allelePos=201 total len = 401 SNP=Y chr8 | SEQ ID NO: 1655 |
| SNP8NRG1AGU486E77_allelePos=201 total len = 401 SNP=R chr8 | SEQ ID NO: 1656 |
| SNP8NRG1AGU325E77_allelePos=201 total len = 401 SNP=K chr8 | SEQ ID NO: 1657 |
| SNP8NRG1AG135E213_allelePos=201 total len = 401 SNP=Y chr8 | SEQ ID NO: 1658 |
| SNP8NRG1AG195E213_allelePos=201 total len = 401 SNP=Y chr8 | SEQ ID NO: 1659 |
| E558B | SEQ ID NO: 1660 |
| SNP8NRG1AG470E558_allelePos=201 total len = 401 SNP=X chr8 | SEQ ID NO: 1661 |
| SNP8NRG1AG530E558_allelePos=201 total len = 401 SNP=R chr8 | SEQ ID NO: 1662 |
| E178B | SEQ ID NO: 1663 |
| SNP8NRG1AG37E178_allelePos=201 total len = 401 SNP=R chr8 | SEQ ID NO: 1664 |
| SNP8NRG1AGD71E178_allelePos=201 total len = 401 SNP=R chr8 | SEQ ID NO: 1665 |
| SNP8NRG1AGU91E262_allelePos=201 total len = 401 SNP=Y chr8 | SEQ ID NO: 1666 |
| SNP8NRG1AGU13E475_allelePos=201 total len = 401 SNP=K chr8 | SEQ ID NO: 1667 |
| SNP8NRG157556_allelePos=201 total len = 401 SNP=Y chr8 | SEQ ID NO: 1668 |
| SNP8NRG241930_allelePos=201 total len = 401 SNP=K chr8 | SEQ ID NO: 1669 |
| SNP8NRG243177_allelePos=201 total len = 401 SNP=Y chr8 | SEQ ID NO: 1670 |
| SNP8NRG444511_allelePos=201 total len = 401 SNP=W chr8 | SEQ ID NO: 1671 |
| SNP8NRG449280_allelePos=201 total len = 401 SNP=R chr8 | SEQ ID NO: 1672 |
| TSC0707270_allelePos=201 total len = 401 SNP=W chr8 | SEQ ID NO: 1673 |
| TSC0707290_allelePos=201 total len = 401 SNP=R chr8 | SEQ ID NO: 1674 |

n=A or T or G or C, unknown or other
X=deletion

Appendix I: Nucleic acid and amino acid sequences (SEQ ID NO: 1-39)
Appendix II: SNP and microsattellite (SEQ ID NO:40-1531)
Appendix III: SNP and microsattellite (SEQ ID NO:1532-1674)

[0241] While this invention has been particularly shown and described with reference to preferred embodiments thereof, it will be understood by those skilled in the art that various changes in form and details may be made therein without departing from the spirit and scope of the invention as defined by the appended claims.

[0242] The compact disk having file name 2345200421.txt and comprising SEQ ID Nos: 1 through 1676, created Oct. 20, 2004 and being 2,756 KB in size, is hereby incorporated by reference in its entirety.

1. A method of ameliorating symptoms associated with schizophrenia in an individual, comprising administering a therapeutically effective amount of a neuregulin 1 therapeutic agent to the individual, wherein the neuregulin 1 therapeutic agent is selected from the group consisting of: a polypeptide encoded by neuregulin 1 gene; a fusion protein comprising a polypeptide encoded by neuregulin 1 gene; an active fragment of a polypeptide encoded by neuregulin 1 gene; a derivative of a polypeptide encoded by neuregulin 1 gene; and a variant encoded by neuregulin 1 gene.

2. A method of preventing or delaying onset of symptoms associated with schizophrenia in an individual, comprising administering a therapeutically effective amount of a neuregulin 1 therapeutic agent to the individual, wherein the neuregulin 1 therapeutic agent is selected from the group consisting of: a polypeptide encoded by neuregulin 1 gene; a fusion protein comprising a polypeptide encoded by neuregulin 1 gene; an active fragment of a polypeptide encoded by neuregulin 1 gene; a derivative of a polypeptide encoded by neuregulin 1 gene; and a variant encoded by neuregulin 1 gene.

3. A method of lessening severity or frequency of symptoms associated with schizophrenia in an individual, comprising administering a therapeutically effective amount of a neuregulin 1 therapeutic agent to the individual, wherein the neuregulin 1 therapeutic agent is selected from the group consisting of: a polypeptide encoded by neuregulin 1 gene; a fusion protein comprising a polypeptide encoded by neuregulin 1 gene; an active fragment of a polypeptide encoded by neuregulin 1 gene; a derivative of a polypeptide encoded by neuregulin 1 gene; and a variant encoded by neuregulin 1 gene.

4. A diagnostic assay for assessing a susceptibility to schizophrenia in an individual, comprising assessing a test sample comprising a nucleic acid selected from the group of: genomic DNA, RNA, and cDNA, from the individual for the presence of a polymorphism in neuregulin 1 gene, wherein the presence of the polymorphism in the gene is indicative of a susceptibility to schizophrenia.

5. A method of diagnosing a susceptibility to schizophrenia in an individual, comprising screening for an at-risk haplotype in neuregulin 1 gene that is more frequently present in an individual susceptible to schizophrenia (affected), compared to the frequency of its presence in a healthy individual (control), wherein the presence of the haplotype is indicative of a susceptibility to schizophrenia.

6. The method of claim 5, wherein the at-risk haplotype is characterized by the presence of: SNP8NRG221132 (SEQ ID NO: 1372), SNP8NRG221533 (SEQ ID NO: 1373), SNP8NRG241930 (SEQ ID NO: 1669), SNP8NRG243177 (SEQ ID NO: 1670), SNP8NRG433E1006 (single nucleotide polymorphism “r” at position 433 of SEQ ID NO: 104 in exon E1006A), microsatellite marker 478B14-848 (SEQ ID Nos: 56 and 57), and microsatellite marker 420M9-1395 (SEQ ID NOs: 58 and 59).

7. The method of claim 6, wherein the at-risk halpotype is further characterized by the presence of one or a combination of: SNP8NRG85307DEL25 (SEQ ID NO: 1375), SNP8NRG103492 (SEQ ID NO: 1355), SNP8NRG157556 (SEQ ID NO: 1668), microsatellite marker D8S1810 (Accession number: GDB: 613185), SNP8NRG444511 (SEQ ID NO: 1671), SNP8NRG449280 (SEQ ID NO: 1672), microsatellite marker TSC0707270 (SEQ ID NO: 1673) and microsatellite marker TSC0707290 (SEQ ID NO: 1674).

8. The method of claim 6, wherein the at-risk haplotype is selected from the group consisting of: HapA, HapB, HapC1 and HapC.

9. The method of claim 5, wherein the at-risk haplotype is characterized by the presence of: SNP8NRG221533 (SEQ ID NO: 1373), microsatellite marker 478B14-848 (SEQ ID NOs: 56 and 57), and microsatellite marker 420M9-1395 (SEQ ID NOs: 58 and 59).

10. The method of claim 5, wherein the at-risk haplotype is characterized by the presence of SNP8NRG221533 (SEQ ID NO: 1373).

The application's sequence listing, which the Patent Office published only in electronic form, follows.

SEQUENCE LISTING (1676 sequences)

SEQ ID NO: 1 - DNA, 1503841 bp, Homo sapiens
  misc_feature (1)...(15303841): r=g or a
  misc_feature (1)...(15303841): y=t/u or c
  misc_feature (1)...(15303841): m=a or c
  misc_feature (1)...(15303841): k=g or t/u
  misc_feature (1)...(15303841): s=g or c
  misc_feature (1)...(15303841): w=a or t/u
  misc_feature (1)...(15303841): b=g or c or t/u
  misc_feature (1)...(15303841): d=a or g or t/u
  misc_feature (1)...(15303841): h=a or c or t/u
  misc_feature (1)...(15303841): v=a or g or c
  misc_feature (1)...(15303841): n=a or g or c or t/u
caagcactttataccactttttataaaataagccctcactttcattacattatttaactygtatttctgccttgtgttatagatagaaagtatattattatttctactttatagctgaagaaactgagtccaaaatgggtagagcaactggcactaaagatcacctagccagtccgagwtcacacagtcagtattaggactggggccttgtgccttccagtgcagggtcccttacaccagtcatgacatagatgcccagatcatgcatgacttgatgtaaaaacaacaatttttgttgtcccagtttgagtccttataaatttcccctgtcaaagaaataaacatgcaactctcagaaattatcttttatggagcttttaaaggccactttgccaargggagctatatarccatgacataaacatgaagatggattgacagaaaatactctttcacaggctggaggaaatattgggggaaagaaattttctcagactgcccttccaacgtggcatggatcatggaggtcagcttttctagcttgtgcccagaggtctgtctacctcagctgtgtcttgtgattgataggaggatacagtctcccagggtgtgatttaaggtggagcttataggtctacaaagctcaagctctwatcaagctactatggcatgatagtacaattataaagaaagtagactagtttctataagctgtgtataaaaccaggcccaccctaacatttgcagggcctaggccaagagtgtatgtagagtctcatataccgtatgtctaaatatttcaaagttataaaccaagaagggcctgtggcccaaactgtgttcccaccctaagcctggtagaggcttctcacaggtgtccttgggagtccctccaggaccagccctgctgcttgccagtctgcatggtcacctggatgtgctgagtcaaaggcaggtggagctgggtgaaagtctgtggttttcagtgaggactggagattctcaaatctgggattgggaactgactcagtcaagcgcctcaaggagctagggtgctccttgagcaggttcctctcctccttatttcaatttgctgattaagaacttctagacagttctaagcccctttcaaacaacacacgtttttagcaaatgagaagaagaaagcttggtcatgttagaaatagtcctgtccagacacacacttcagagcaatctggaatggccattccccaagcatgggctgcaattcctttctcccctgtgtctccctaacgcccacacccactcatcagctcttagttcagcacactggcctgtgggtccgagtttggtgtgtgccgcatccctctcctataaactctttttgctcaataaattactgaatcttcaaaagaaaaatttttaaataagaccaaaaccacaaaacaaagcaaacaacagtgacctggtattttggcattcattttgtgtggggccctctaaagcagagggtcctggaggagtctcttcagtccaatggctgaattactccaagactctttcatacaaaagttagctgggcatggtggcatgcgcctgtagtcccagctacttgggagactgaggcgggagaatcacttgaacctgggaggcggaggttgcagtgagccaagattgtgtcattgccctytagcctgggtgacagagcaagactccatctcaaaaaacaaaacaaaacaaaacaaaaaaaactctttctttactttataaccatatggcaggacatctcagttcatctatgacctgtggttttaaagtaaattctgtttaaagttatctttaaaatagctttatttttgttaaaatagagccatatcttcatctgcgggaaatcatattgactccatgataagctatattctggaaaatagtcagtgtgctgacgattgctacctgtgagtagctcacccaacccayaggcaaagtagcaaagagagaggcatggcaacccccaacgtgagaggcttgtagacaacccacagttctagcagatgtcagtgcaacggggcaaatttcatccccctcagagcatggctctgggcaccactggacacatctgtttcaggataatttgaagtccagttgttcagacagagttgatcttaagaccatggtggctactgctgaattttttcagataaagttagtaaaatccgaagttcacccaggtggttgatggcaatatgaactctatataatactgtctgatgccaagtatcttagtcaactcaggctgccataacagaataccacagaccaggtggtttaaacagcagatatttacctttcacagctctggaaactgggaagtctgggattaagctgccagcatggtcaggttctggtgaggggtcacctcttggcttgcaggtgtccaccttcttgccgtgtgctgtgtgtggtggagagatctctccttacragggccctgattccatcatgagcccatctaaccatgattacctcccagaagccccacctccaaataccatcccattgggggttagggtttcaacatatgaattttgagaggacacagacattcagtccataacaccaaatctgtattcatcctagttcagcacagagcagaacctatgtttacccaatatcctttgaatactagttctgaccatagcctttgtaatttaaaagctctacagtcattttttttgaattataaatgcaatacacacttttactagaaaataggaaaaaattaaataaaacttatccataattccaccaatttgagactaacagttggtttcttttcttccaaacacatatgtgtatataaatatacgcatatatacttccataaacaacatatttttaaaatgaaattagattcatactgttgaggttttttttttttttttaatcttacttctttcaacatgctttaaatagtaagcttttcccttgtcctaaaaaaatttttacttcttcactttttaatgttttggctgtctggaccataaattatctgcatttatatcttatattatttagaaaatatatatctgcttttaatcccctcgtttttaacttttaatttttcaaatggattttaaaagctgtgtttttgctaagtatcaactcaagaaggaaatgttctcttttgagttctacctttgctagatgaagaatgtggcccacctctcctctcactaccccttcatgtcaaagccttggatttgtggggctttggatgttgtgcttattttttgaaataaaaataaatgaacaatttcctatatatagaaaattattatgcatataaaccatgcatttttatcacaaaggattttagttggcagttttctgcaatatactagttattttcacaaggtggaaatccagaggattgattgacttgaatcctgaatccctacatcctctatcagcacccagtgttcttgcaggttttcaaagaaactctccctgctattaggctaaggctttagattcaaatactcatagagaatcttagccctaggctaaaaatagggcccacctttagcatgggccgtattttgttccttcttccatggatatgtctggagcagtcttctttagttctgattcctggccaacatcatagaaagatgaatcctttaggaagtgcaccaaagaaggagcacttttgcataatgactagagctcctcatctctgccaaccaccccaagtctctctctctttttattttttatttttttgctgggcccaaccccttgtttctgtttgagcaaaatgcataaacttagaacagacattcttaagccttgtgctgtgttacactgttgtactacgagcatttgacttatttttgctggaaccatgaatatgtcttgaaaggctgctgtctgctggatgaaacactgagctaagcaggtcatacaacaggctgtagagtaggagctccaacttggaactaaggggcataaagtgtggtaccctgcccactggtgtcaaagaaaaattaagcattcaaaggaacatgtgagggctttgctttctgacagtgtggttctggctatactgagggttatcttttaaaactagcatggtatagaagagtgacctcatggacagtgcagtaactagatgcttccaaagggtgtgagatgctgcttttctctagtagtatttgtgttataattattcctggcttgtttgcctttagtatttttttgactgccaaaaattatagcattcaaaaaatgtgccacaaaaacaacaaagttgacaactactgatctggaacctttctaaatgtgaccagtcagagaccatagccaatattttctattgtctatagaatgggatgggcagagaaaacagctaacaaaaaaggaaaaaacaacccaaaatatttcatggtttcagctttattagcmtaacagtcaagttgttytggttccacgacttttaaattaagcgaaggagaactctcccatcaataggttcattgtgatgccaaactttacatattttggaaaaacattcatttacccgccaggcaagctgcctsctctcttagagttcgtggtagggaactataagcataaagacctttctgaggaggttttccttattttattgactgcctcatatatttacaacttcccaatttattttttcagactgctaactcctgtgttcctagattcccatttttcaattgattgtgggctttttctagggttacagatttaacttccatgcaagtggtggggtgtcccacatcaggaccttgtatattctaactctaaacactcttcgtatttctgtatgtctccagaccagcaaacttacacagtcttcttgttattgatatttgccttttgtgtgttccaagagcatatccctaagtgcacagaagatgtgatttttcttctgtcattgtctccaaaacctcttctttcctgcatctgaagtccccagaccctggataagatttctactttgttgcactgaggaacagaacttttccctttttatttacagaagggtctggctcttatcacctctgaatagcatgccattctcttagcctcatctaagaaacagactgtaggggaagagaagatctagaatgttggtcaccaaccaatggcagacattatcaggtaagaaacctgcccacccaaactctggaccctaatatgcaagtctaactagttccataaaaccaatccctgctaaccccacaaacaggttgcctatagccttacaagtggcctccttggtttttagtggcatagtgcaggtgagccatatattatgcttctcaatttatttccattggtcagaaaactggtaaaaaattccttttcaatggtatagttttcgaatctcaacagagacttctttggtcttagtgatgagtcttcatggtattttggcttgcaygtagtaacaataatcaagtcattcacccagtgcaagattttggtgtctttatttttaactatttgtattgtgcattatcacatagataaccatttgttttgctggtctcattgctcacgtagaagtctgaatataattctttctcagagtgtgggaaatcatggattgatattcttagtttttgatgtagtgctttttatttttaaccttcttagacaatttgtgagcaaggaagtcaggaactgtgagccacctgccatcttaatttgacatctagtctcactactttcaagcacctccacttcaaaatactcttacaagtgaatcaccattgttaaatggatctttgaaggaattttgacaaccagactgaaaacaatctagacatcttagatatttgtggcttcacagaaaataaaataaaacaacccwtttcagcatcaagttatattttccatagctacagaatctggtaaataactatgttactcattcatctaggtagtttgatactacctactgatactggagttggggagggaagtgctgggaagggaagggtgtggtccctggctagggctccacccctgggcctgtgcccatgaacctaggtgaggacaggcatttctgtttttgtgcccaaatgttgcatttcccaagaccaacctggcctaccacacccctctcctgtgcctataaaaactcccaataccctagctagcaagcacacagcaactggatgtcgagaggaacacaccagcagaataagatacaagtggctgggcattgaggggaatgctctggcgtaagagcacatcaacagatgccggcaggccagcaggctattgaccagcaggacgaggtgaagtttggctggggcagtcgaaggagagagctccactgctgagtggccgactccaggggaaaaccaccttcccactccatctcccttctggctcccccatctgctgagagctacttccgctcgctaaaatctttgcactcattctccaagcccatgtgtgatctgattctgctggtataccaaggcaagaaccctgggatacagaaagccctctgtccttgcgataaggcaaagggtctaattgagctgactaatgcaagccgcctacagrgagctaaactgaaagagcacactgtaacacatgcccactggggcttcaggagctgtaaacattcrcccctagacactgctgtggggttggagccccacagcctgcccgtctgcatgctcccccttgaggtttgagcagcggggcaccagagaagtgagccactctccctgtggcacaccctgtgaggggsacaagggaacttttcccattttactaccaaggccagtgacatgaatgatcaaatacyaaccagctacattttatttaatttttaatttttttagttgtcagaagattttattaactgtaagccagggaatggactgatcgattttattatgcaaatcaatgaaaaaaaaaaactcttttagaaggacacaaacacacacacgtgctcacagggaagctggttgttggttgagagtcaggtcagaaccttggagagctcaagataaagcgggggcagaaccacaatcagaagcttccatggctgccccccacatggatgagttttatttaattatttttttccttcaacttttattataagctcaggggtacatatgcaggatgtgcaggtttgtgacataggtaaacctgtgccatggcggtttgctgtacagatcttcctgtcacctaggtattaaacccagcacccattaactattcttcctgatgctctcaaccagctacattttaaaccctattttctctaaagatacatcaacagattagcttattcttcagtcctggatctaacataatttgtacagtaaagtgaagataaagtttattcagattatttgtacaagtactttctcatcaaagtgcagcagtctactttctgtttcccatgggtgataggagatagggttaaygaaacagcagtaatttagagaccagttttagctgcatattgcartctttctttagaactatcctaaaagctgtctgttgctttgaaatgaatcttacttccatttcctccttttcttttggacctgctcaggagcaataaaatagagcaaatgtaaacagcagaaatgagacagaaggggacttggagataaaagaaatttgtttcttctgcattcttcagaatgcagagtagttcctggcagagagtagatgctaagttaatgtttgtcaaattaagtgcataacccgaatattcagaatagaaatctaaatagtttttacttgcctgaacacaggaaccttactcctagaaaatttggctggctagcagaaacaactttaagtgccttgaaaaaataagtaacagatgataggttgcttctaactggaggctggtggaagacaacatcacattaggtctaggggaggattattacttgggaaggtgggcttgagtcagtgatgggttgagaggatgcggtagtaaccaaacaggtcagccaagccagcagccatcagggatggagccaaggcaaacttcaagcagacaatgctgaatacaaaccatgtctaccttctcagattgcctcccacccacctttctctttacatattggtgtaatagctatgctgattagcctgtctccttctggatgtgggtgaaaggccacattctggagtttaggacctgctttttcaagtggtactcaggggattaaatgacacaatccagaagtgtgtgtgaggagtgattagctccctgcatgtaaaacttgataaaagaaaaatgaaagacaggagtcctcgcttccttctttctttcaaggactactccaaggtgagatttcatttgcacattttcttaagaagtcctgagagctgggcagacatggttgcatcctggcccttgtgttgcttctttctcctctcaccctcattcttctagcctttcatttcccaactaaagggtcaaccctttcattctttcttcaggctctgctttctaagaaatcaggagtaaggtactgactaccccagagctgtctcacttggagctctttccctcaagcttttctgtttagtgtttttgtttgccatccaaggacataaaaagagaaggatccttcctcaaaaaccatgccctcagtctcctatgttactcctttttttggtgctgtgtaatagttatttyacaccataataaatattagctatacttgccattgtataggtgtaggggaggatgaggaggttcaaactgtattcccaacatcataacttcctgttacatccaagagctgttgaacaatatcgagtttcccaacrtatgtgtgattggaatcaaaggaggagaagaaagggagacagttcagaagataatatctgtggaaataatggctgggaattttcaaaaaataatgacagaaaccaaaccacagatccaggagtctcagagaacagcaagaacaaaaaaacaaaaaacactcactcctctccctacatacacatgctgtggcatagcataaaaccaaaaaaacagacaaaaycttaaaggtagtcagagaaaacraaacattacataaagmggaacaaaggtacagtggtgcaaagaattacagtaaactttttgtcagaaactatgcaagccagagacaatggagcaacaactctaaagtgctgaaagaaaagtatttgttaaccaaaaattctacaccttgtgaaaataccttaaaaactcaaggtaaataaagattttcttagacacacaaaaatggtgagaattcattttcagcagacctactgtatgagaaatattaaaagatgttcttcaggcagaaaaaaataatatatcagactgcaatgtagacctatacgaggaaataaatttcattctttctttaagatactgactaccctaaagctgtctcacctagagccctttccctcaacttttcttttcttttctctctctctctctcccttcctttctgtcttctcttctcttctcttttcttttcatttcttttctttctttttgacagagtttcactctgtctcccaggctggagtgtgatatcggctaactgcaacctctgcctcctggcttcaagagatccttgtgcctcagcatcctgagtagctggaattacaggtgtgtgccaccatgcctggctaatttttgtattttcagtagagtcggggggtttcaccatgttggccaggctggtctcaaactcttgacctcaagtgatctacctgccttggccttccaaagtgctgggattacaggtgtgagccactgcacctgacaccccctcaaacttttctatttagtgttttgtgtttgtaattcaaggacataacgagaaaagagttcttcctcaaaaaccataccttcagtcccctatgttattccttttttagttctcttactctgtaaaattctttcacactataataaatattagctatacttgcctaggtataggtgtagtaggtggtgaaaatggaaataatgaaggtaaaattaaattaattttctaaatattcttaattactctaaaacaatggttctgaaccccaggagatccctttccattacgattcttccccatgggaacactggcaatgtctggagacatttttgattgtcacagcyggggtggtgctactaatgctagtaggtaaaggtctgggatgctgctgaacaccctactatacatgggacagactcacacaaacagaattctccagtccaaaatattaatattgctgaagtttagagaatctgctctaaaagataacttctaaagcaaaaacagtaacactgtattgtgtgtttacagtatatataaaagtagagggtatgaaagcaatagtacgattaatgggggggaggaattgggactaactattgtgatgtccctacatagcacaggaaacaatgttatttgaaggtaggctcttgttaattaaagacgyatattttaaaacctaagacagccaataaaaataattaagataaaatggaataataaaatacattcaattaaaaaagaagagcctgaaaaggagagcagaaactaaagaatagatagaacaaatataaaacagctagcaagatggtggattttaattgagccatttaaataaccacataaacctcatttawtgagacctgaattaacttaaaaccaaatcaaagacatgacaaaagaaaaatgttatgtcattatccctcatggacatatctatccacatcaaaatacattagtcccacttattggtgggggatattttccaagaccctcagtggattcctggaactgcagatgataccaaaccctatatatactatgcatgaatttcttgttccttcttcacaacagataaagtcacagatggaaaattagttttcatcatggatcttagtaacttcagcatacgattttttttctttccatattaagtcaagaactttcaccttttcacttaaaggaggcactgatgscttcttttttggtagatctgaatggctagcatcactactcttgtgctctagggccattacaaagtaaactaagaatgacttgaacacaarcatcacaatactggatactatgatggttggtctgataaataagacaactcctgagtgagtaacaggtgtgggrgagggtacagacacatggataccctggacaaaaggaggattcaccttcctggtggggcagagccaggcggtgtgagattttgtcatgctatccagagtggtgtgcaatttaaaatgygtgaattgtttatttgtggaattttccatttaatatttccagaacaccactgaccataggtaactgaaactgtagaaagtgaaaccatgaataagaggagactattgtattggcaagttgaatatagcaattttcaactttttattwaaaaagttgaaaattactaggctgggtgcagtaattaaaattaaaaaatttaaaaatattaaaatttttattttaatatttttaaattaaaatatgtaaaaatactaggctgggcgcagtggctcatgtctgtaatcccagcacttcaggaggccgaggttggggaactgcctgaggccaggagtttgagaccagcctgaccaacatggtgaaaccctgtctctactaaaaatacaaaaattagctgggtatgggggtgtgcctgtaatcccagctacttgggaaactgaggcaggagaatcacttgaacctgggaggcagaggttgcagtgagctgagatagcaccactgccattcagcctrggtgacatagtgagactccatctcaaaaacaaaaacaaaaacaataaacaaaaaaacactacacagtgaagtgaggcttacatgggcatgtcatgctggttcaatactaaaaaaattcagtcaatgtaactcatcatattaatgatgtaaagaaaagccacttgatcatatcgacagatgcagaaaaagcatktgaaaaattcaccagccattcatgatgaaaagtgtcagcaaactactaacagaaggaacttcctcagcctgataaagggcatataaaaaaactgtatagctaacatcatttttaatgctgaaagactgaattcttactctctgaaatcaagaacaaagcaggaacgccactctccccagtcctataatttacagcactagatgtcttaactagtccactgaagcaataagaagaaataaaaggcatggaggttgraagaagaaaaaaactgcccctatttgcagacaacatgaacatttataaaatctaggaatttagaaaaaggcttctagaatgaaaagtaggtttatcaaaattgcgggacacaggccaatacccaaaaccaactgtttttccataaactggtaacaatcggaaaccacaatctgaaaatgatatcatttactatagctccaaaaaatgaaatacttaggtataaatctaagaaaacatgcataagatctgtatgctgaaacccacaaaacgctgatgaaagaaatcaaagaagacaaataaatggagcgacacatggtattcatggattagaagacttaagagagtaaagatgtcaattctccctcaactgatctatagacttaatgcaacaccaatcaaaatcccagcaagttttttcttgtaaataaagacaagctgattctaaagtttatatgcaaaagcaatggaactagaatagctaaaacaacttagaaaaagaatacagttagaggaatctcattactagattttaagacttactataaagcaacagtaatcaaggcaatgggatagacacatagatcgatggaacagaaaagataycccataaatagaccttcacaaatatggtaatttgatttttgataaaagtgtaaaataattcaatggagaaagggtggtcttttcaacacatggtgttggaacaatctgtcattcacatgcaaaaggagacatgcatcctcaactttatccctcataccaaaaattaattgactcatagctctaagtattcactgtaagactataaaatttttaggagaacacaggaccacagggacctctttgcttagttattcgggtcagagagaagtactttctttcagtttcatgcctcacattgctgtgtgcctagtgctgtatccgcctatgttgctgccttgagaatgcagcttcatgactgggacttgcttcagtctagggcagggagaacaaaaagaggaaaaaaaaatgaggatttgcccacagatcctccatcccacgggggcccttctttcaggttttctggttagaaacagaggatttctctgggaacyttttctgcccacagttgctgtgcagttcctggatttgcattgccctgcagtctaagctggaagatatggaatgaaaagatgtcaggaaattcactgccctctgggttactttcaggatttgattttcttcccaaatatgcctgctattatttactaatcagcctccagatgctcactttatgtattctgtccaaggattttcgccaccctttctgataccgcaaactgccctccgttttacctccctgcatttccaaatgcatcatcttagtacctcttagtagaactggagccactaattctttcctcttctccatgtgtttttttttttttttgaatcagagttttgctttgttacccaggctggtgtgctgtggtacaatcatagctcactgaagcctcacttcctggactcaagcgatccttgtagctgggactacaggcatgagccaccatgcctggctaagtttttctattttttgtagagatgagatcctgctatattgcccaggctggtcttgaactcctaggctcaagtaatcctcccactttggcttccccaagtgtgggactgcaggaataagccagggtgcctgactaagtttttctacttttgtagagatgagatcctgctatattgcacaggctggtcttgaactcctgggcttaagtgatcctcccactttggcctcccaaaatgtcgggattacaggcttgggccaccgtgtctggtcccaccaactttttgatggaagaagtcaggttcctcgtgtgggtgattgctttgaagtggaaacagcaccaggttctagccaacaagacataagggggccttctgggagaactattttgccctaacaaagagagcgacccatggagaaattctacctccctttctgccattgagcgttattgtataaggacatgatgctcagaagtgtggctgccaccttgtaccacaaaagaaaagcaaaaacattatagagaagcaaaactagagcccagatatgttgagcagtcaattagacaaacttgagccagttgcctttagactcctacttgtgtgggatcataaatttccaatatttaaaccacttttagtgagtagttttaaaattgcaacccaggtcattttaagttataaactaatattattccatttagggattcagccatccacaaaaataactgggatggaattaatgaatatttcttaataattaaattatgttttaaaaatatgggtgagttgctagtttattcactgatttgacatatgtgtgaagattgtttttatgtgttagaacaataaagctaaaaatggatatacaacctgaaaataaatatggattacatagaattattcttgatttctttgtggacttggagagatgttataattctattcatttaaaaaatttgtttaaatgtatggggtacaaatgcaattttgttacatgcatagattgtgtagtggtcaagtcaggacttgagggtatcatataattctattctttattttccttcattcacccttaagaaatattaattgggtgtccattatgtaccggaaactcattctaggttcttggggcactaagaagagccagaaaaagttgctgtttttaaagtgttaacagtatagtaggaaataaagacatatcaaccaatactgtagttaaaatgcagagtgatacaaactaatatatggacatgtataaaattattacaggaataaaaaaagctgttttgaggtatagtgtttctttcctatgataatggatttatataacacgtatgaatacagtccattttgtttggttctagattactgggtagtatcagatgctttaattttcataacttaagactttgaaaggaatatttgtcatagaaatgagtgaaaaatggcccctgtttattggcccctacattgtttgcttattcacagcacagtaggatggttagctcagaacctgccagggccaaacgcaaattctttcacagccaattgcttaaaggtagcccaaataagcatattttcagccacttacagctcacctgctttgcatcctctacacaattgcatttaacatctgctagccacagagaagacaaaccttgtagctgtagaagaccccaaactgctgcagcccttttgagctctctgagccagagactccctgtattgcttctgggcaataccacctggacacatgtgccccctcaccgatccccgtctcccctggaatttcccttgccctcttcttctgggtgtctctggramgtcttctgctgtgaggactttcccttttctgcaatcctgtccaataaagcttgcgttgtgcaatattgccttcttgttctatctttctgtcttttctttgatcagcccccagatcctcaaactcaccattgttctctgctattatttttcttttaatgygcattaatacacacacatatatatacacacacatatacacatatatacactctttggaattcttttccttgtatgtctcttcaatattctctcacacttccttcaaatgtctgcccaaaccttgcttctcaatgagtccttccttgaccaccctttctgatactgcaacctgccttccattttacctccctgcttttccaaatttcccttcccttgctctattttttttcttatttctctgctacttgttgtctattcacatactatatactttactcatatatgtttattgtttattgtatgtcactacctattaggatattatttcttcagaacttgaagatactgctccttggcctcagcagtttcactgttgctagtgacaagtcaagataagactatttccttcggtagccttgaaatttttccctagaaacttttaggttctcttgtttatctgtgtagttctgagctgcaccaactttttaaaagagagcagtcttgttctttcctaccatttgatacttagtaagcatttaattctgaagatgtgggtctttttttcagttctggaaacttttctgtgtgtatacccaaacacacacacacacacacacacacacacacacacacacacagagatctttctataaacataatacacatatataattctgtgtgtaaatataatacacatcatacacatagatacacacatgaacacacacataaaattttatatctgtgtgtattatatttatttcctctctgctattgtagaacttgtggatctgttttttatgcaactgaaggtttatctcatattttccacctctttttgtgatttttaatgttttatgaagaattctttagttcaatttgattttaatagctccattttccccttcagcctaccagttgagtttttaaatatgaccatatgtttaatttctaagatctcttttgttatatttttatagaaggcttttcttatttctctgagggtattaactgccttattttaaaactttattttcctttgtcttctatttgttgaatttggctcctgtcttttgtggatattaattttcctcaaatgttgtgtgattcttgtttggttgcccatatttttatttgagagtctccttttgcctcttggtggtctgagtacagaaccctgtctcagggggtctagggggaggtggggattgttgccgagtaggttgtgtgagaccataatcttccgggcgtaagtcactcttggggattgtgactgatggtggtagctggaattgttctcattgacaggcttttcttacacaagagtcaaccccaagttctagggctcaaatcttccatttctgagagctgtgctccctgcttttacttaggggctaaagccagaacctctgttccctttcaacgtttttcttcctttgttgtccacttcgaagtttagcagtactttggtctttgctcttctgttttcagccccaacatttctacaaagcctgtggctctaaaccttgtttgctcattgcaatcacctgggaagcttgagaaactactgaagccttggtcttacccccatccccacccccaccctgagatcttaatttatttcgtctggggagcagcttggatgctggcatttttctaaattttctagttgattttaatttacaaccaagattgctaaccacagtgctaggaaatggtctcaagcagatctttcctgtaagtgtattaaaagttcttggagtttatcgtagggcagaagccttctttatctgctgctcactgtaagaatcagataggaaggaagggggctgtctacacagcctttggtgacacagtttctttaattagtcatcttcttgtttgaccaatagcctttccttattttgtatctcttaaccttaataactgaacttgaagtacttagaattgcttttacttcaatagttgtttttattatttttcttagttgttttaggctaaagtttctcttccgttttttccccatcactctcctcttagtgatgtatgattttccaagattatttaaaatttctggtgcactgattggcgctatttttcagcatggcagtacattttttaaaaattatttttcttgttatttgcgtggatttgaagaggaatggatggacacatctgtgatcatactaccaaatttattccacctcctagttctatctccatttgtctttctctgctaatagatctataaaatgtggaaagagatgttttacaatctctcatagcaatcctattttttgttttacataatttgatgcttttatatgaaacataaagtttcatggctattataaattttatgtagattttgcctttcatgaatataaaatgaccttcttttctatggaaaccttttttttttttttttwaccttatattaaattttgtttgaaatcaaaggggccatcctttctgtttttaaaatttcatttgtctggtaagcctttgcttattctttcaaaacatttctcattttaatgtgtctctttaagcttaaatagcgtatgtctagatttttaaaatctttttttaaatggggagttgaaataacttaaatgtattatcataacttatatgcttggcctcatctccgttatcttgttttatatttttagattttatgctttcttgctgttttctggatttatgtcttttactttgtgtaatatgctttgtttgcttttaccttttccaatgttctgaaaggtaaacattcctcttaaaattttaattttggtttttagaaaatgatacttaacctattattagaaatttaaaaaaaattaaaatttccatcagaattcttacttgcaaacaatagaaactgactctggctagattaagcagaaaggaatcttctagaaggataaggagctgtccacagaattgataggaaggaaggttttacatggggagaagccactggtggctgcatggcaggactggctaggccacccccaggaatggcagctatctgattgcctctgtttttccatggtctttgtgttccctggacactggcaccagacacttcctcagccaccttccccacccctgctctggacactgagctccacagctgccactgctggatttctgaaaagtctctgctactaagcatcatttgtttcacatgaatgtcccaaacaagagcacaccacgggctaagcttaagcctccagcccatggcagagccaaaaggggtttgagagggcaagtttctggctttttcagcttggaagtgtggcaagttcttgcttgcacccttccccaagtcccagatctctgcccaatatttatccctcctctagttttattataatctcttctcaatattttataaattatgacaaaactgaaaagtgaaatacctctataccagaggtctccagtctttttggaagcagggaccagttttgtggaagacaatttttccatggatgtgggtgggaggggattcaagtgcattacatttattgtgcactttatttctattattattgtgttgtaatatataatgaaataattatacaactcaccataatgtagaatcagtgggagtctggagcttgttttccttcaactagatggtcccatctgggtgtgatgggagacagtgacagatcatcaggcattagattctcataaggagcacacaacctagatccctcgcatgtgtagttcacaataggattcatggtcctatgagaatctaatgctgccactgatctcacagaaggtggagctcaggcagtaacgtgagtgatggggagaggctgtaaatacagatgatgcttggctctcttgcccaccactcacctcctgcttttcagcctggttcctcccaggccctggactggtatcagtctgtggcccagggattggggacccctgctatatacaggggtaaaaaaagagggaagaagagagaatttggttaaaatatattcatagaaggaaggaagtgtgaagagaaatcacggtccttattgcttccattggttatrtggttgcagatccatgctgcccagtgaaagttcttgtaatgatgcaaatagtttgtacctgcactgttcaatgcagaagccacctgtggccagcaaacactcaaaatgtggctggtgaaatgagaaactaatattttaattgcatttaattttaattaatttacatttggatttaaatagccacrtaaggctggtggctccaatgctgtacagcgtagctgtgaatagaatgatattccctttgtcttcagccatacgtcagtgaactgggatctctcccagtctaattctttgctcaatttcaggacaaccgagaaacctagctaattttgcctctatgagacttccatagtcattcactcaaaactcatcattgaacatgttaagaaaggatctaaccatattttcctttgtccttatggagaaggagcaaccttatttcctttttgataattcatgtcaattactaggcaatcctgtaacactgcatttttatctgttcacccgatggtaaagggaatacagacagtctggtggcagttcactgggatggttatctccttccttgcaaacaaaacttccaaactagtggataacagctataagaatgtgtaaagttttttataagtacattaccaggtttaattcttagaggtatcacacctccttctgctccattgtttcctggacccatattctgactgtagaagaaagagaacatacctagaatccttcagggctgcaatctggcctgtctttcagctggagtgactcatttttccacagctcatggaaatgttctataagtctagctccagctgcttttagatgatgggatacataataaaactagtagctggtttattcattttttccccatcactgtaaagtgagttcctaggtcagaaacaatatcctttgaggcaccatgcctgtcatgactatatatgaggtattcagtaatggttgcacttgtagaagcatagttgggaaggaaagcatatcaaagtccaaataataagtgaagataaatggcacctttatcaggaaggaaggttgccaatgcaattaaccttgtgctaggtagctggctaggtrgctatcccccaaaggcatggtattatattgggggctccaggttggtcttttaatgggaaagttgagcaaacagcagatgtgttatctagggaagagagggttggctgacaatagagaaggtmattttatctacctgattattaaaagcatccctgcactgggtattcacgtttgatacaaatattctctccctttgggcccattctgagggtcctctagaatagtagctgaaattggggttaaaagctgcttaaattttgacagtctgctttacttctctaaataccagacatcttcaccaggttattcccttgatcttgtgtcctgatattatgaccatgcctctggcatttaagtgccccatgtggcctctgtcaccctcagatcttcccattttctttaaaatcaaggaaacaatttcactgcatcatgttctactggtctccctgtcccatagggacctgctcaagctgttacaaagaatatagagtgtcagtggtgaaatctatgtcaataaatacagtcttatgtaatatattctcccctccttgtccaatattgtctgaatccattcacatatatattccccatatgttttgccagcataaacaggtgaggccctgcactgtgtgtgtatgtgtgcatgcgtgtgtgcatgtgtgtgttaagcaagcaagttcctcctgggcttgattttgattttgtaatagtatccctggggcatgtttagatatgcttcttagtaaaggtttagggacattgacgaaagggaattctctcatttttaaaatgacgtatgtagagttatattgtaatgaggaatcagtgttcttttggctggcaataaaggcttactggaaattgaggcttgcaggcatagaattctccaaatattttgaatgtaaacacaaacacaaacacacacacacacacacacacacacacacacacacacacaccacactagagagcaccagtaaagaaaaaaaggttaattaaattacagtataaatgcatatttgttctcttttgttatcttaactaacttaaaaagcaattgtaaaaaaatgtagataatgtattgctttgcctataacataggaatgtgttatgtttgtcaataacagcacaagtaggtgagtgggaacaatggtgtgctgggaaaatgattccagatggttacttgatcaaagtataaatgaaggaaaccagaaatgataaatgggaaggttaatacaacaaaagctacaaatatatatttgctcccctttcttttctctgctctttaaaaagacctaaaatcatataaaggaagaattttaacaatgtattattgggttggtaatattgacagatatacaacaatagtactacaataagtaggaaaagggaatggaactattaaaataacatatctgtatttcactggaattaaaatgatatcaatctgaagctgattctggttagttaagatgtgttggtaggccctacaaaagacgctaagaaaatgactcaagaaaagtaaaaaaattgttaaagaaatttaaatgcattagtagaaaatattcactcaattcaaaagaaaacagtaagaaaggattagaggaataaaaaaccatgaaatttatggaaaacaataagtgtaatggtgaatgtaaatctatatcaataataacattaatgttaatagaatatacaatcaaaatgcacaaatgattagattggataaaaaataagatccaactgtatgctgtctaaaggaaataattttgattcaaaaacacaaatagaatgaaagtaaaaggatagaaaacattatgcaaatggcaaccataagaaaggtggaagggctatactaatatcagacaaaatagactttaaaacaaaaaaaggtactagagacaaggagagggactttatagagctaaaagggtcaatttgtcaggaagttatgagtgatcagaagtgttttatcagttttgagaaaccctttgccagtatttgttcacatctctcttaccccattttccttctctttttcttctgtaacttcacttgcttgtttattagatcttctccctaaatcctacctgtctctaatgcttttttctgtgttttcaattcttttttttcctttctctgcttcagtttgattgttttctgttacctgttttccaggtgatggatgctgtgtctaatgtgttattgaacccaactagttagttcttaattttagattttgtttttttttagttctggaatttccatttgatcctgttttcaccattttgaatataccgatgaaattacctagcctttcaattctttatgcatattcttcattttcatattaattgaacattaattgaattgtggttattttaaaatccttgttagttaagactaaaattgggatcacctatgggtctgtttctattggttatttattttcttttgttattttttgacatgtgaaggaatatttgaataaatgccagacattatttatttaaaaaatacagaaactctagattcctgagaaggctcactttcccctcttggcagagtggtggtcagttggcttacttcagtaaggaactgtgctgaatcatggctgcatgagggatgacctctggctcaagactgaccttgtgtagtttcatctaggatgttggtgtgttttgggaacgttcttttttatggatatcaaattctaatctttgtcatgtgagactgacaacagagctctgttttgttttgcagggtcttcccagttacgtttttgccttttgccacatacgggttccagttttcaatacatgttttggggaaaataatctgccatatgcttgaaacctcataattctccaccaaaactcttctgattccttttactcctgctgcagccctcttccagctgttgccctggattttgccctagactcttagcttcttgcccatattcaaattcatcaatacctccaggagaaaagcaactgcagaggccagttcacctctctgtttcttcccttataaagtattagtccattttgttcttgttgccttagcaactcttgtctttttcaaaagaaaatttttgtattccgtctggcttttctagctctggatgggagcactggtctttggacaagtggacaagtaatacatcctccctagaaggtaaagaatctttgtgtagtacatattttgaaatatctttctgtttattcatacaaatttgccatttagctgatatcagaatttgagggacatgatatttttccttaaaagcataaatgtattttttttgtctttttagcattttagagtttatcaagagtctgatttttatttattttgttgttaaacttaaaaaaaaatctgggtgtttaaaggcttatctgtttagtgaaaatactatatatttttccaggatatgtgtttatgtgggttatctttcagtgattttgaagagtttgtgataagctttatacactaagctttcttgacagtttctgtgtggttttcaattaagctctagatgtttgcttcttctctagttggagtgtcttcctgagaatacctgtgactcttaggttcaagctctctttcctttctccttacccgtaatcttcaccatccattttttttttttttggtcactttggtttttttgtactgcattttgaaaaatttatcaaattatttctgtttgattagattttaccaagtttaatcttatgcttcattgaatcaatttgcatttaaatcctactattgtgattttatctttttgaaaattatcctaccttgagtcttttttctctcttttctatgcatattagtcttttattcttagtcttttttttttctttgtatcttggctttctgcttctgtttcatagaagtcatgcattctaataagtatggcaaactaatggaaatttytcctttctttagcaaatcattttcagatatttgttatccttgtacatttttaaggtgatctttcctttcattttcattgcagtattttaaaaatcaactttagtgaggtatcatttacatttattaatatacacccattttaaatgaacacttcaatgccctttgtatatatccatatattcactaccacaatcaagataaggaatattttcacttcctcaaaaagtttcctatacttttttttgtagtcagttactccaacatcattctcatgcaaccacggatatgatttctatcattacagattagttctggctgttcaacaatttcataagaccagagccatctgctatgtacttttcttcctagcttcttttgctcagcttaacattattaaaatttattagtattgttatgcctatcaatagtttgcttctttttgtcacttagtaatattccattgtataacacgctgcgtgtatccattcttgtattgactgaatgtttgtgtacccccagaattcataactgaatccctaatccccattatgatggcatttggaggtgaggcctttgggaggtgattaggtttagatgagacaatgaggatggggctcccatggcggggtttagtgtgcttctaagaacagaaagagagcagagcactctcaatctctctctctttctccaccgcccacacccccaaaacacacactgtggctgtctgtaagtcaggaagaggacccttatcaagagcctgaccatgctggcaccctgatcttggacttcccagcctccagaactgggagacataaatgtctaagtttttttcacccaacctataacattttgttttatcagtctgaggagtctaagacaattctcctgttgattggactcttgagttttttctagtttgcaaccattatgaataaaactgctatgaacattcacgtatcagcctccttttcttcatgtgtatgtttaagtctttgtatatatttacagtaactgttaatgaagaccctgcttgctaattcaatcatttccatgttttctttgtccattccaattaactgatatttctcttggatatcagaagcattttcctgccattttgtatgtggcataatcttcatctgaatgctggacatttttgagtgtctggattttttcctccattcctttaaagattttggagtttttctgtgtcgggagggtaatttactttctggatcattttcatacttttgggatgtgttttcaagtttcttttgagtggatccagagtaacctttactccatggctattaagccttactcctaaggtgcacacattttggagtctctatgactgctccaaatgttcagtggtaactcttcattctaggttgtcagaactcagatacctcctgtactgcctgaggaagttgttcagcttccagcttccctgtaggtttttcctagaagccattctttgcctggttagtcctacgttgcctgttgttcaatgtctgaaagtagttgttacatatattttgtctagatttctagatgtttatgrtcggaagcctagtctggtactggtacatcatcatggctggaagcaaaaatcatattgtagtattttcttttttaatttttattttttgagtcagggtcrgggtctcactttgtcacctaggctagaatgtagtggtacaatcatagctcactaaaacgtcatactcctggcttaagtgatccttcctccccagcctgctgagtagctaggagtataggcactcaccatcaggcccagctgattcattgttttgttgttgttaaagatgggctcccattgtgttgtccaagctggtctttaactctcggcctcaagcaattctcccaccctggcttccaaaaatgctgggattgtaagcatgagccatcacacttggccattattgcattattttcaacagttatttaaaattcattttactatttgattattttattttattcactattcattattttattttattcaccattttcttagagtctatgtgaatggtttgctttgtaacacctttgtccttttggaggtgattgaaacctcttttcaaatacatagctaagacagaaaattaatttcttcctagtcttagtgaaattctcagtgacattcaatacttgtatgtcagctaacattactgagtttgactacatgaaacaatccaatccacaggtccagatctttgacactttgaataaatctactatgaaacttcatgactccttgtatgttctgcagtcagagatcttcatcttttcattcagaggataaatttattgctcttctttgagagttatgaaataagactctccctttctgtctttctggatagtgtagtccaaagatgttacatctagtattgcttcggcaagtttgacaccacgacggtaggtagaaggatggtagtttaagcagaaaatgggatcctactttaatttatacaaaaatatttatttagtacctattgtgcatcagacactcttctatgagctagagatacaaaaatacctgaaccttgcattccattgaatcaaaccactgcattacctaaccctgaaatgcataccatctttagctttttgaagttacgatagtcattttctcatctttattgtttaaagccatttgacttaagttttctgtacttgcaaacaaaggaatcctcagaatatttcactgggctgcatgctcacattgtagtttaccactgccagttccccatccctcttctaacaaaattcttgcctggtgatatttttgataagaatggtagctaacattaattgagcccttactatgtattgggtacttttctaaccactgtacatgcattgtatcatttagtcttccaaacaacccaatgaagtaagtactactattatcgcccttttactaccggggaactgtaaactttctcaaagctaccttgccagtaagcatggaggatttgaacttagcttgtctggtgggaaagtctgagttttcaaccacaacattcttttactaaacacttgcttttattcactggctgtattgtgaatatgttttcgtgcattcaaatatcctcttacaactatattaccattttgctccaacatattcaattatgtaggtaccatattatatttagcctacatctccttttttggcattattttcttctaatttttcacttgaataatgacattgctatgtacattcttgtatatgttactctttttttttttttttttgagacagagtctcactcttctgctcaggctggagtgtagtggtgtgatcttggctcgctgaaacctctgtctcccaggatcaagcgaatctcctgcctcagcctcctgagtagctggattacaggtgcatgccaccacacccagctactttttgtatttttagtagagacagggtttcaccatattggccaggctggtctcgaactcctgacctcatgatccrcccgcytcggcctcccaaagtgctaggattacaggcatgagccacagcacctggccatattactctttttagaaaaccagtctaattatttcttttctttttttttttttttttttttgagacagagtctctttctgtcatcaaaactggagtgaagtggcacagtcaccactcactgcagccttgacctcctgggcttaagcgatcctctcaccttagcctcctgagtaggtgggaccataggtgtgtaccactatacctggctaattaattttttttttttttttgtagagatggggtttctctatgttgcctagatttgtcttgaactcctgggatcaaggaatcctcccaccttaaccacccaaactgttggaatcatagacatgaaccactgtaccaggctactctaattatttctttagaaaaattcctagaagtagaatatctggaaccaatgaccagtctattttaagttcatgatggaatatgcaacgttgtcctccagaaaatattagtttacatttctaccataagtatatctttctcagtattttagtaagaaatgtggtaagcattaaaatttaaaccaggctgggtgtggtggctcatgcctgtaatgccagcactttgggaggccaaggtgggtggatcacgaggtcaggagttcaagaccagcctgaccaacatggtgaaaccctgtctctactaaaaatayaaaaattagccaggtgtggtggcacgcgcctgtgatcccagttactcaggaggttgaggcaggagaatcgcttgaaccccaggaggtggagatggcagtgagccgagattgtgccattgcactccagcctgggcaacagagcaagactccatcaaaaaaaaattaaaccagaaattccctttattcatttttagcccagatttatctgttcctgatcactttatttctcaaggctatcagtgcttatcattttttcctcttgggcagtatctatctgaattctgtatttttaacatgtattttgactcctcatgttcctagttttaaagaattagtctgtgaacttgctgtgggtttaaggttttttcctgagaccctgagacctcactaagattttcacttggcagggttaaagagtgaaataatcacctggatatcatggctgaaaatgctattggaaagtgaagaggaggttgcatgcagtggctcagtcctgtaatctcagcacttagggaggctgaggtgagaggatctcttgagctcaggagttcaagaccagcctggacaatgtagtgagacccactctctactaaaaatacaaaaaattagccgggtgtggtgggacatgcctgtggtctcagctattcaggaggctgaggatgaggcagaaggatcgcttgagtctgggaggttgaggctgcagtgaactgagatcctgccactgcactccaacctgggcaaacgagcaagaccttttctcaaaacacaaaacaaagaaagaagggagttgggttggaatcacttaatttgagaactcatttatatctcattaactagtttcctgtttttattttaaaacccagatatcacagtgaaatttaaactcatattcataaaggaaaacaatctgcaaagtccaatctagtttatatcattagtaagaataatagtatggtttaaataagatctatatatttttactaatattcgttctgctttcacaaatatattgccaygtgtagayctctccttcataccaagagttcagttggcaccatgaacagttcaaaacactaatacttgtgatcacagtattggttcttaattaaacgtacaattcccccccacacactatttatggattgctaaaacaatattttcacctttatctttggctgtcagatagcaagttggacagtgaagtagaactgacagaaatgaagataactacaaagttagcattgatttttgcctccccccctctgtcttttgagattgtttcttcacatttctcatatcttttctcctgacttatgaaaggcaccctttcttgctctaggcctttcattgttttgaaacataaaaaggaacatcaaagactttcatcgtgtgcgttttggatcttactctacgttgacaatatcgagaggttcacattcctactaagcctgtgggtttagttcagcaatgctccccatttttctctactgaccataacatttcaaccctgctggaatctttgaagatggttattgagtgactttagaatcatcctcggagttagaaaaccccagaaagcatcttttctttggtattttattctacatcttgaaaacagtaagaacaaatgcacttctctggggatataatgactaggaatggagaccatactaggaaaattgacatgaagagcaaaaagatccactcaaatagttcttttgcactatacaatgtgtcacaagttgcttcttaagaagaaagctagtcaaaatatagcttaccttttgtgtctcagatggctgggctttagaaattgagacactctggtcaaatatctagcttcagaaggtgttgtttacatcctcatcaattcatctattatttgcaattgtttgcatttcaggttttagaaataaaaaagtgttataagaattcactgtatacaaactgacttaaatgtttttataggcttagtcaaagcctgatttctttacaagattagttctaaatgaaaatagaaagagcttttgatccctcccaagggagtattcccagataatattattcatttactcttccttataaatgattttctctgcttataatttgtggtttatgttttcatacttgcagttggtaaaactgtccacgaaatcacttctgacaccaactgcaagtttgggggttcccacgaccaccctcacctctgacaccagctgtaagaatgagtgtctatgaggctactctcgggcttgataatttgctagactcactcacagaactcactaacagccattgtcctcatggttacagtttattgcagcaaaagaatatataccaaaatcagccaaaggaagagatgcatggggcagagaataggagaattcaaaacgttgagcatctagtcgtcctctcccagtgttaactgcacctggaatgatgtgtaacaatactcagttagtattgccaactatgtgtctgttgtcacatggcactatttaacactgagctgtggtgaccagagttttcagttgggtttcagacacatagaatggttggctaactcaatctccagcccctctggaggcagagctgatactgtgtaacccaaaacttctaccataaatcccattgctagawgatctgggatggcccaaggctcttagctaaactaagacagtcctgtcaggcagaacattctaagggttcagagattgtctcccaggatccaaggacaaaggtcagacctctctttgggcaagattaaattctgtattacacaataccagatgagcagctgtcttttgatggctgtaaatggatagtgaaggatattttcaatatattttgggtaggagtagtgatctgtcatttcaggaagattacaggagtgtagatttgtgtctggtaggatgagaaagccaccgtttgaacctgtagataattctgagaccactgataggaagcatttatcctttggccaatattaggttggttgccatcaagtgttagcagcatacaacaagcttaggttttctaaaatacaaaaagatccttactgagagcatattagaggaaactaattctgtggaaggagaagtatatttgcttcaggattaagaaaaaagcagcatcaattctacattccatttaagtacatttccatttgcttgagaaaacacatccattatttagttgcgaatcaatttttgagtgagcagtgaagaaagacttagacgagagtctttctgaaagcttttatgggtagaattctacaatagagacttgattgttcctcattgtttcctccagttccatgaggattctatgtcatctctcctaagttcccttttatctcccccattagatgagaaaatgtgcaccaggccatctcctgcactcttccccatcttggctaatcattgctccatctatccatttgctcaggccaaaacctatgtagatatctgtatcagttattattgttgtgtaataggctactgcagacttagtggcttaaaacaacacccctttgttagctcacaattctgtagttcagaagcccggacatggcctatcttgactctctgctcagggcctcacaaagccaaaatcagggtgtcagtctgctgcattcttatccagagctcagggcttttttccaggttcatccagattggcagaatttaattgcttgtggttgtggaattaaattttccattttcttgctggatatatgggctgaagtttactctgagctctttggggcttttctcaggtcctagttgtgtggatttctcaaaacctggcagcttccttttctgagcaggcaggatgatctttctccagtctgccaagacagactcttatataatgttgaataatcactagagtaaccatcctactacctttgtcacttaacacaacctaatcaaaggagtgactaacccttaatggttacaggtcctatctgtggccacagggagcgattaagcaggggttgggggttttgggacatctcagaattctgctcatcaccatgtctttgtattgtattacattattcttcttcttattttatagagacagggttttgccatgttgtccaggctggtctcaaactcctgaactcaagcgatccacccaccttggcctcccaaaatgttagtattataggcgtgtgtcaccacacctggattgtgttacgttatttaataaaataatcatgtatctctttgtaatattaaaaaagactttaaatgaataaaatctagaaagaaaaaaataaaccagagactttaaacattcaaataaatgggggaaaacaaagaagattttaaagtttaatacatgcaaaatgttaaggaaaaagaaaaagggaagcaaagaaattacatggttaaaaaataaaataagatggtagaaataaatcaaaatttatcaatagtgccataaatgtcaattgactaaacataccgtcagtagagattctttcattggatgaaagaatataatccaactacatgcagtttaaagagtgcccctgaactatggtgatacacaaggtttatccactaaattatttaactaatattgtttttgtttctaagggctcttcagggagaaaattaaagtctctgtgctcctgaagctcacgttatagggtgggatgttgatgaaaaatgaaaagctatgtaataatgtagagaatgatcaatgctactaagaatggagcaggacaaaggggtagagagtagtttggtgggtgggaaggcctggatcttttagctgggctgtttagggctgactctgagaagtagagatctgaatggtgtgatctgagagaccaaaatattatttaatagatgctcctttatcaactaagatggaccctacggttaaggtaacttttgttttcttaaccttagggtccatcttaattgataaagttcgattttcagaaatcagctaatatgacaaatttccaaattctaaggctacaagaaaaaaacacaatcttgctaaattccctaaaagtaggagctatcaggctcctcctaactctgatttacaacccagaccactacaactctgactggactgaggaccggccttacaaacattctttcctgataagcaaatgtagaccttaagccagcttcagccagatatagaggctgtgcacaaactgtctccatgtcctgtagttcacctttttgagatgcccaggtgggaaggactccctggcagaacttccaacagacctgtgcgctgggagcaacgcgcactcgggtggagtcttgggaagtttgccccgtttccagtggggaggagcctggaccccctcttcctgggtggaacctgggattcagcctgcggggcagcaagcaygctagcaggactctggctttgagaagggtccctttttccccctttttgcccaataaatttcattttttctcacccttcaaagtgtccgcgagcctaatctctgatggtcatgtgacaagaacccggctcttagctgaactaaggaaaatgtcctacaacatttcgacataaacagccaaattccattctattttaatactaaaaccctgcccaaagtgaacatgggacgtatattacatatatgtttatccattgcacatctgctcggctccacttgtaaatatgcatagcttttctccaaaacctgctgaatatgtatgactctattgagtaatatgtaccctgtgtggcataaaacccaacctgccctttccctccttgaagcaagagcaccttcaacccacaccagggactcttcctgttttgcaacctgataatgccaataaagctctcctttctactatttagccctcctggtggtcttttggaccagaatagattgagggaatgagccacgtgggtatctgcatgcagaataagtatgaagaccttgaattgggatgtgcttgtcatgcttgagtagcagcaggctgataaaaatgccactaaagcagagtgtgcaagggaggacaggtggggaaaggaagtggcaaggggcaggtgatgtaggtctttaacaattatgctaagtgaaataatccagacacagaaaaacaaatagcatgtggtctgtcttatatggtagaatctaaagaaggtgaatttgtagacggagagaattacagtggtgcttgtcaggcactgggtagcaggatggtttagagggaattggagagctgttggtcaaagggttcacgctttcwgttataagaacaacttctggggatctaatataccatatgagtggtgatggatgtactaattaagttgattatggtaaccattcacaacgtatatgtacatcaaatcattgttttgtacaccttgaacgtattcaatctttatcaattaaatattttaaaataaagaaatagatggggaaatatatttattgaacacctattttgtatcacacttggtacctagtttgggaacacaaaatggacaagacagatggggtcttgccaccttgaagcttttgctaaatcatgttccctatgaaatattacttactgttatgacactgaccaaggttctttccttgtcctgactctaatcaggctgcattcagcctttgtggtctcaaccttgggctttggtgcctattcttgtggattccagttgtagcaagaatcctgcttaaagtcagtttagccagaactccaactcttgatacttagtcaccctcattcttcaattaaattcctcatctctcatcatcccccaggtaatatctgatcaccttagcctgctctcagcaagaatcttgccaagttggtttggtcagaatcctgtctgatgtttcctgttagtaattttgcatccactgatccctgccctgctccttggctgtaaatccccacttttccttgtattctgaattgagcccagttctatagtcaggtctcttttctcctgttgcaataattcctgagtaaaatatatttgtcacgatttaactcctgccatctctggtattctttgacatcacaaatacataaacagcaacaacaacttggtctccttgaaaataatgggaacactcaagctcatctaggaccatggaaatagcttatttccttatatctttcccttcatcttctttaaaagctatgatctttcaagagctacatttagaatcttacatggctgggcaaattttgatctatcttttggtgaatgaatcactgactattcaaccatataacaacttctggctgcattgttacccagtagcgagagtttgccaaacagtactttgcatgacaaactacactgtatctgcccatatcccagctttccaagtaatctttggaaagtgtttattataccacaaagtttccaaatgtttatttcaattgcttaggggaaaaaggattggtttggagggcagtgaaattggttgtttttcctacccattttccatgtgtttcactccattaggtctgggcttgcaaagtttaggaaggggtttgtatgtcacaattcaactgcaaatagaacatagcaaattctcttgtgagtgttttggaaaatgtatgctgctctttcagtgcttcatcaggctgtgagagattgtgaaaccccacagctttcacagttttgcagtcagaagaaagccttttttgtttttattactgagcatttaaaactcacgagaaaaaatggaaaagccctagaataaaagcgtgttgagaggaggttcaaggcagtggcaagaatggctatcccagttttgggtcaaaacaagtgacaactaacaagacagagaacatatttatgcttgctactttaatgtttggtctcattatcttattagatatattgaacgatatttgtaaataggcagggaaaattgaagctttgtgtgtgtgcgtgtgcgtgtgtgtgtgtgttttattataggtagcttttatagcatgggatttctctcataacaggtagaggggcatggttccttccccattctgaagctttgtgttgtttttttgcttttttttctagtataaagagttcaattagggtaactctgccccttacctcatttgtcctggtgatacgtatgaaataacaccaatttgctagttagattaattgtgattagtgattagattaattgtgtgcactccacttcttcttgctcatcttccttttaggaggaaggctgcccttggaggggaaatgttccctmtgttcctttcgcccatgagaatgggcctgctgtcttgtccactactgcctgtgactggctcagaagtgggcctaatgctgggattcattgaatgtgccttcctacccagctgtatctttgtaaatattgatcttttagtttctatctttaatcttttatgtttatttttcaaatttttcagaagcttatttgggaagaagggtgctatttattggggccaattcagagacctaaactgtaactcaaagatcagttctatgaatatagaatacagaaatccaatcatcattgcatgagagagtgccaagttcaagccaatcagctaaaaggcaaatctcaatgttttgtctctcaaaacactctctgcataaagaccttggacatactagtttaaccaatagaaaagcttgtcagggccaggcatggttgctcggcctgtaatcccagcaatttgggaggccagcatcgaaggatcacttgaggccagaagttcaagactagccaaggcaacatggcaagacccgatctctacaataaattaaaaaaaatatattagtagggcatggtggcatgcgcctgtcatctcagttagtcaggaggttaagttgagaggatcacttgatcccaggagggtgaggcttctgtgggctgtgattatgccactgcactctagcttgagtaacagagcaagaccctatctctaaaacaaaacaaaacaaaacaaaacaaaacaaaacaaaacaaaacaaaacaaaaggctaatgagcattaaacctacagaaaggaatctgagcagaaaaagccaatggtcaatgatagggaatcctgatttcttactgacacccaaaacactaataaatctcttgatgatgtatgagttgctgttaccttgcacagcagtgagcagttctatatggcaattgctcagttagctctcaacttcctgaacagcagttgcagttattcagccttgctcttaagcgttagtctgcatgctgagttttagactagctaactgttagaaaaggtggatgctgagacctgcagagggaagttctcatgacacagatgtatgtgtctcaaaaactgttttctcccagtatgtagcctccagagagattccctgcctggcttggctctggggtgaaggaggctggtggttttcaattaaatgcttataaaatattttagaagaaacagggacagattgtaaattataaaaatgaccacagaagtatttccagccccatctgctcttccagaaccttgtcactccccatgaaaaggtagattttatctgggtagggctttcttactgccttgaggcaaaaatgtggttctgaaagtgatgctgggacataaaagaccgtaagatacttctctggctctttcttaggatgcggttccctggaaactgagccaccacacggtaacgaagctgtgaaaaaagaaatatatatattatatatatatagccatgcacggtggctcacacctgtaatcctagcactttgggaggccgaggtgagcagattacttgcagtcaggagttcgaggccagcctggccaacatggcgaaaccctatctctactaaaaatacaaaaattagccaggcatggtggcacacgcctgtagtcccagctactcaggagaggcagaggttacagtgagccgagattgtgccactactccagcctgggtgacacagcaagattctgtctcaaaaacaaacaaacaaacaaacaaataaacaatatagtaggttgcggtatttccaccacnnnnnnnnnnnnnnnnnnnnnnnnnnnnnnnnnnnnnnnnnnnnnnnnnnnnnnnnnnnnnnnnnnnnnnnnnnnnnnnnnnnnnnnnnnnnnnnnnnnncaggctggagtgcagtggcgtgatcttggctcactgcaacctctgcctcttgagttcaagtgatactcctgcctcagcctcctgagtagctgggtttacaggctcccaccaccatgtccagctaatttttgtatttttagtagagatgtggttttgccatgttggccaggctggtcttgatcacctgacctcgatgatccccccacctcggcctcccaaagtgctgggattacaggtgtgagccactgcacctggcctccactcacagtttttaacacagaagtttcaaaacttttgtaaagagaggtgccaggagaatcttttgttctaatatttggtcttagaccccagttccgtacacagggtttctaagacctttgtaataaccatagtgataggagcatctgacacaaagctcctaaatcccttggaatttcccaggtgataggagcctcttttgttctagtgagctgactcttggtgggctcctgggtgggtactggtcaccagaaaaaccaaggcatgcttagaagcttggaacttttagctccacatctcgtcctctgaagaggggagaggagctagagtctgagttaatcgatcaggcttaccagtggcatttagaaatggtgctagacccaacttctgaggagttggcttattggatacatgaggaaatgcaaaacaataagaaacatactaaacatacaatcctttggttattgttatttataacagcaaaaaatgaaagaaagtacagagctggactttgggtcctgcacaaagctcagttttggtttgaatgagcttcagctattagcctcaaagatgcttgcaaagggaaaaattaagcagggacaacagaaagtatctctggtcaccaagagggcagtcagcttggggaaagggacaagccaagagactactgaaacctgggggtattgcatgaagaagttatctcatcttgtggattgataccatcagctccctgaagaacctttactaacgtggattgtgagagtagctaatttgggggctgtgtcttttgttttgaatgctacagagtggaagcacatgcttgagttgattcaggatccacaggtcactattgaacaatccctctacacagggagttattcctatacagtatggctataaagtgtgtttatcctaaaagtgggattgtaactcccccataaatcccaagtggaacatctcagatgatgcagctgataggcttcatatgcaagctttatgaggagtggctattcgtttgctgaatatgcctgtaactgagcagcttggcttcaaatagcattttaaaactttgctttctgtcctcctttctctccaatctcaagatataactttgagacaaattgtatatgtgttacctgtcatcttgaaatacagccttggaatgtgctgtgaacatccactccttttcttttcctgttctatgctaccatgtctgatgcacgtttatttacctatatgcttgttaagcacacaccatactcacttatctggtcatatgtttccttagaagcttcaggggctggatcctgatatggaccagacacctccagccacaatggcaccagacgtttcaccagatggaacaataacttaagacaagccatcatattggtcatgccacctgatacctcctaggccccctgcctcttctgcattccaaaccttctctttaaaaccaacccccgtgttctcttcacaaattgaagagtggagatttttggaaagtattacaccccttcttccccttcctagcatggataataaaatctcactctctttttgtcacacttcactcttgttatattggcttctttttacaagctacaagcagccagacccttttgccaattacatgcccattatgaggcytatggaaaatgttgtgattaaaggagttccttttccatgggcaccccatgtgtacttctgcaaaatggaacaatagcttgaaaagccttaccagatttgctgtctcagcttcccctgtgggtcttactgatcaaggacattatagtaaataaaaaaaaaatgagagagacaaagaagagagtcatggacttgtcccagcagggtaggagtctttagatggttattgagaaactggatgaatgttgtggatattgatggtgttgaaacaaaagtattaatgcagcactattgaaggttagatgaaccaatgggactttctgtttgtctcccaacattgaaaggctccaacaagttttctccatttaccccagtttggagaaacttaaaaagtcagagattactcagaactggttggggtgacggttaagcaggttaatcaagattgatgargggccagggtctcctggccagacctcaggctggcaggggtcccaaggacatatgcacatgtgtagataaaatggtcagtggaaggagaagagacttttctgggactccttggtataggaggtcaatgcattgtaattccaaaagctgttggtgaagacttaacaggagttaaagttaagattgggggagtatatggagcttcagtggttggtggggttaacatggaagtttggaggacaattggaattcttgaaaaagctttatgtgagttggttgtgtcacctttacctgaatgtattattgggatggatattatgtctgactgcggattgcttcccctacctaatattgttattagaagttatgtaagtcttccctcaggccagttttctttgaatgtgctaaatgagaaccattagaactgcctgaatccacacaggtggttaatttaaaacaatatggagtacctgacagcagcagaggggggtgggggggtggggggcaaaaggacattcacactttaattaatgacatgctagatgcaggagtgctgatacaaaagaattttttgaacaacagccctgtgtggaaaaggaggatggctcatggagaacaaacagtagattattgaggcttaaatacataaatttgtacctcagtacaattttatagcctcagtaattttagtcatgatttcaatcatacaaaaagactgctactcagtgatcgaccttgcaaacattcttctctcagtctcagaaagtgccaaacactgtttgctcttatatgggaaggatcccagtttatgtatactrtgctaccatagggtcatctgaactcactggtttactgtcataatttggtcagaagggatttggatttgatgtaggtctcaagtgtaataatacactatattgatgatgagatgataatattggaaactaaagagccaggttaagactgagttgaatgcagcgatgactcacatgaccaaccaaggctgatcagtaaattcagcaaacatccaaggacttgcccacatggtaaaattcttaggaataacataggcaggagccacccagttccacaagtgactacaaataaactgctgttgttaatcacccccaagaccaaacaagacatctagcatttggttgttgtatttggagtttagagaatgcatattctacatctgaaaatattgctagcttctatacataagactacctgaaagaaaaccattttgagtggggacctgaacaaaagcagaccatgtctgaattacaaaaatcaatagctctctcaatgcctctgggccattatgatctccattcagatgattttggaagtgtctgctaccagtgctcatgcaaactgcagcttatggtaaaagcctgagcacctgggattccagatgctgccgccccatacacatcattcgagaggcaattactagcttgctgttgggctttaattgagacgacctcaatgactgaaggacataaaataatcatgaaacctgagatactgataatgtcttgggtgatgtcagagaaacactctaataagaaaggcagtgcccagaagagctccatgataaagtggaaatggtttatacagaagcatgctactggtggaatgcaaggaggcacctactgtatccataagtagctagcctcaggtcccctaggactgacttcagaatcactggaagaactgccagactctattgccatgtggaagtgccctatgaacagctcttgatgggctgacaaagaactgctgggtttatggatggcagttccaagatggatggacattatgttgtctggagatatgctgtattaagaccagaagatacaaaaactagtttaagaaattaagaacaaattggcttaatgggttgaattacatgccggttttttttttttttagcagtgatggaagagtttaacaatggtaaaagcccttatgtttgggtttttataaactcatgggcaatagccaatggtctggctatgtggtcagatagatggacaatggaaaactgggctattgaagggatggtcttatgtggtgtggccttatggaaattactatgggaaattaaggggagcattgaagaactacttacaggttcaggaggtgacttaaaccatcatatagacttattgatgctctcccatgaggtggtgagctgggtccatgaaataagtgaacatggtgtgggggttacagccatgcagaaatggactgaatgtagacatattcctcttcactctctgaagcacagaatgtcaccaagaactgtttcatctgtcaacaggagagatagagattgcagatggctacagagaagattctacatggggaaggccccacacatagctggtaagtggattatattagaccaatgccagtagcccctgggagctacaaatgggtcccagcaggaatagacacttactctggactggtagtaaatgcaaatgctgaaaatactatttaaagattggaacagacaatactgttccaatttggctcatcaagctacatttctttagcccaaggatgcactttacaacccatagtgtccaacagtgagcaaagaaatactacatcaaatggacatattatgttgcatatcatcctcagggtaatcgtttaatagagaattggaacaggcaattgaaatatttaccacctaaaacaagagaagacaaaggcatgagggacttgccttcatgagtgtgtgctcacactcaacatgggggaggataaaggaaggctccccctggatagatttctcacttttctgggggatctggcaaagcaggggtggaaatctccctcctgctgccagtgtggttatatgatttttcccatataatctcactttttttttgtcccagtaagaagcactggagcactgcctgatgccaagggtcctaggaccagggatgtgactgtgtacatcctcgtaagcaaggatgatttctaggcaagaargtgtaactaacttttaaacatctatgccagaagtcctaagggcctgatagtgtgaattcacatctgtgaatattgctgtgttgcctagggattgggctagccctgacatccccgataggacagttctgtacccaggtaacctgaccctatctgaatggaaatggactgaaagggaggcatttgttagactagcatcactgtcagcaatggccctcccaaagatggaaaactctgggtcagaataaatgacaaatggagagaaggagtaatagtagccgggggtaaaggaatacagtgcatacatgaggtatgcaacaagggaaatgcaacattgtcttaatacctcaggagagactcagatcaggatattatttcttagcacaattatgaacagatgtttggaacggtgaagctgtatgtttgctgagaccacccctgcttttggaacctttcaaggttgaacgacagcctgcaaacctgaaaggcatagttctgggagccattctggtcatatggtatgatgatgaattagactgttaatgaccaaatgggactctagtaacgtatcagtggtatcttttgacttctatattttaggctacatcaactacaaaggatatcttttggggaggaagttttgaggactgctttctactgagacttcaatctatgtggtgtatggctctcaacagactgatcactatggtaaccacaaaacctacaaaacctgatggtcaaatgcttagaaaggtccttggttatgatagaaaaaatatgatggtagcatgcccaacatagcatgcatttaggctatgcataaatacataccactcttgtttttgtggacagaaagctattaagcagtatagggaaaaacaatgggcctctggtaggattaaagaagttggcatcacattgtagatccaagttcccctggggaatgaccccactcgaaataaggaaggctgtgagaggccttatggcacactcaaattaaattacatctacctgtaaacaccaatcatctaactctagtgtggggacccaaaattttttgcaaaacatttatcctaactgcattcgygccattagtacgcaataccaatgatatgcatggtagattaaacaacactggctcctaagacagaaaagggcctcaggagagataggtgcaggtctaggtatcctgggacaagctgagtttactcttaatgtggagcagcattcggaggaaaaagatttattaactagaagagacagaatagaggaaattctcttcaaggaggaaggcaaaggatggagtcggggcggaaagataatgaggctttagcgaagtggatcaggccaactcaacaaacaatgctgggcactgctaacacccagcccaggggaaagggcttgtaccctgacccaataggacctcttgactattttaatacagatggaagctgaagtggccatggggcagtgacctgctattctggctgctgaggtccaagagacccacccatgggagtctgatggccttccaaacttatggaagttctctgagggcacttgtagttttacactgatagactatgaatgctctcacccacagcatagatcaaaatgaaatacatcctgcagtacagttggtagaaatgggaaccactctgaataccacctgtgtcctccctgcaagaaggaggtgggccttgctatctaataatacacaatggaaaccagcctcagtacaagcctgtgagatgaggtggggtggttctttttgtcctcaattaactagaaacccagatataactaaaccatggccaactgtaataatgcccttccttaataatatctgacaaatggacaagagtagattctgttgggaagacaagacaaattcctctgtaattcttacttatttgttcttttatgaaactgagttgtcccatgaccatacggtgatatggtgtcatactggtgctgtaagtaagattcaattacctggtataaataaatcttatgatactactgatattggtgactcaatgtaatgggagattgagttaaagtctctccaggatgtaatacttatggaaaataactgacttgaagagaaattggatttagctaaccatcagctgatttttctgctaaatagttctgcaaagcttattacaagacacaaatagcaatagaatgcacaaattagtacaagaatatgaaaatgttggttatgattttataggataaattagctgttcctttaaatctatccctactccaccctgggggttcagagagcttctgggtaataagtacatctgtgtgctgggtgagggaggcacacccctattccatgaggacagaaacctccataaacaggacccttctacaccttgccctgtgtatctctccgtttggctgttcatttgtatcctttaaaaaggactaagaaactcactcaaaaccgctcaactacatggaaactgaacaacctgctcctaaatgactactgggtacatagcgaaatgaaggcagaaataaagatgttctttgaaaccaacgagaaaaaagacacaacataccagaatctctgggacacattcaaagcagtgtggagagggaaatttatagcactaaatgcccacaagagaaagcaggaaagatctaaaatggacaccctaacatcacaattaaaagaactagagaagcaagagcaaacacattcagaagctagcagaaggcaagaaataactaagatcagagcagaactgaaggaaatagagacacaaaaaacccttcaaaaaatcaatgaatccaggagctggttttttgaaaagatcaacaaaatggatagaccactagcaagactaataaagaagtaaagagagaagaatcaagtagacacaataaaagatgataatgggaatatcaacaccaatcccacagaaatacaaactaccatcagagaatactataaacacctctacacaaataaactagaaaatctagaagaaatggataaatttctggacacatacaccctcccaagactaaaccaggaagaagttgaatctctgaatagaccaataacaggctctgaaattgaggcaataattaatagcttaccaaccaaaaaaagtccaggaccagatggattcacagccaaattctgccagaggtacaaggaggagctggtaccattccttctgaaactattccagtcaaaagaaaaagagggaatcctccctaactcattttatgaggccagcatcatcctgataccaaagcctggcagagacacaaccaaaaaagagaattttagaccaatatccttgatgaacatcaatgcaaaaatcctcaataaaatactggcaaaccgaatccagcagcacatcaaaaagctgatccaccatgatcaagtgggcttcatccctgggatgcaaggctggttcaacatacgaaaatcaataaacgtaatccagcatataaacagaaccaaagacaaaaaccacgtgattatctcaatagatgcagaaaagtcctttgacaaaattcaacaacacttcatgctaaaagctctcaataaattaggtatcgatgggacatatctcaaaataataagagctatctatgacaaacccacagccaatatcatactgaatgggcaaaaactggaagcattccctttgaaaactggcacgagacagggatgccctctctcaccactcctattcagcatagtgttggaagttctggccagggcaatcaggcaggagaaggaaataaagggtattcaattaggaaaagaggaagtcaaattgtccctgtttgcagatgacatgattgtatatctagaaaaccccatcgtctcagcccaaaatctccttaagctgatagtcaacttcagcaaagtatcaggatacaaaatcaatatgcaaaaatcacaagcattcttatacagcaataacagacaaacagagagccaaatgatgagtgaactcccattcacaattgcttcaaagagagtaaaatagctaggaatccaacttacaagggatgagaaggacctcttcagggagaactgcaaaccactgctcaatgaaataaaagaggatacaaacaaatggaagaaaattccatgctcatgggtaggaagaatcaatatcgtgaaaatggctatactgcccaaggtaatttacagattcaatgccatccccatcaagctaccaatgactgacttcacagaattggaaaaaactactttaaagttcatatggaaccaaaaaagagcctgcattgccaagtcaatcctaagtcaaaagaacaaagctggaggcatcacactacctgacttcaaactatattacaaggctacagtaaccaaaacagcatggtactggtaccaaaacagagatatagatcaatggaacagaacagagccctcagaaataatgctgcatatctacaactatctgatctttgacaaacctgagaaaaacaagcaatggggaaaggattccctatttaagaaatggtgctgggaaaactggctagccatatggagaaagctgaaactggatcccttccttacaccttatacaaaaattaattcaagatggattaaagacttaaatgttagacctaaaaccattaaaaaccctagaagaaaacctaggcaataccattcaggacacaggcatgggcaaggacttcatgtctaaaacaccaaaagcaatggcaacaaaagccaaaattgacaaatgggatctaattaaattaaagagcttctgcacagcaaaagaaactaccatcagagtgaacaggcaacctacaacatgggagaaaaattttgcaatctactcatctgacaaagggctaatatccagaatctacaatgaactcaaacaaatttacaagaaaaaaacaaccccatcaaaagtgggtgaaggatatgaacagacacttctcaaaagaagacatttatgcagccaaaaaaaacgtgaaaaaatgctcatcatcactggccatcagagaaatgcaaatcaaaaccacaatgagataccatctcacaccagttagaatggcgatcattaaaaagtcaggaaacaacaggtgctggagagggtgtggagaaataggaagacttttacactgttggtgggrctgtaaactagttcaaccattgtggaagtcggtgtggcgattcctcagggatctagaactagaaataccatttgacccagccatcccattactgggtatatacccaaaggattagacatcatgctgctataaagacccatgcacacgtatgtttattgcggcactattcacaatagcaaagacttggaaccaacccaaatgtccaacaatgatagactggattaagaaaatgtggcacatatacaccatggaatactatgcagccataaaaaatgatgagttcatgtcctttgtagggacatggatgaagctggaaaccatcattctcagcaaactattgcaaggacaaaaaaccaaacaccacatgttctcactcataggtgggaattgaacaatgagaacacacggacacaggaaggggaacatcacacaccagggactgttgtggggtgggaggagggggagggatagcattaggagatatacctaatgctaaatgacgagttaatgggttcagcacaccaacatggcatatgtatacatatgtaacaaacctgcatgttgtgcacatgtaccctaaaacttaaagtataataataattaaaaaataaataaataaataaaatgaactttgtaaaagcctttgtaataaattggtaatagtacgtaaaccattttcctgggctctgtaagctgctttagcaaattgtttaactcaggaggggattatgggaacctctgatttgtagtcaagctagacagaagttgtggggaacctgaggacctaccacttgtgattgaatctgaagttgggggcagtctggtggggctacagccttaacctgtgcagatactaattccagttagtgtcagagttgaattgaatcataggtcatctagctggtacaggagaattgtacagtgtgggaaaaaaaatccatatctgactacagtagtgtagagtgtgagtayagagaaaaacagttgatttttcctatacattttatgtcagaagtgaagcacgtattgagaatggtgtgagtatagaaggaaaagcagtttgtgtttctctatatacaagcccaggccacatggagagatatgtgcaggtattctagccgacaaccccagctgaggtctcagctgatagaatcaacctccaactataagtgagtaaaccttcaaatgcttccaggcctcagcctttgaaccccagccaatcctgggtggaacagagatgagctaacctaccgagcctgctgaaattgcagattatgcgaaaactaaatatagccgttattttaaaccactgcattatgaggtaattattatgcagccacacaaacaggaatggaacccattttattcaatgacagcttctgccactttgctgaagccttaatcatgaattatatggcaagaagtagatttacatttatgaayaggtcaagaggaaagaaatgaagtcttgttagaacaactgtgtttctggaaaaactttttctctggtaaaagtttcagcaattgtgttagtttctcgtggctgtcgtaatgttaccaccaatttggtggcttaaaacagcagaaatttatgctctcacagttctggaggccagaaatcagaaattggtatcactggtgacaccatgatgaacctggacaacattatggcaagtgaaacaaggcagacacagaaagataaatacaggctgatctcattcatatgtgaaatctcagaaagttgaacccataaaattagagagtaaaatggtagttaccagaggataggggaggggagtgaatagsgaaagggaagatatcgattaaaaggtacaaaatttcagctagacaggaggaatacacttagtgattcattgcacagaatggtgactataataaataataatgcattgtgtatttaaaaattgccaaaagagtagattctaaatgtttttaccacaaaaagggtaagtatggtaattagcttgatttgatcattccacaatgcaaatatatatcaaaacatcacattgtatctcataaatatatataaaattatttgttatctcaaaataaaataaaatttaaaaaataaatcagtatgactggtatgaaaccaaggtgctggcagggctgtggttcccctggaaattctagaagagaatccattctttgccttttccagcttctgtctgtggataccagaattccttggcttatgtctacatatcattccaatctttaagagtgccatcttcatatctctttcctctctcttcatatccttttttctgtgtgtcaaaccttcctctgccactctcttataagaatatatatgactgcatttagggcccactggataatccaggataatctccccatataaaaatccttaatttaatcacatcttcaaagatcctatttctctgtaaggtggcatgcacaggtgcctgagattaagacctaaataacttttgggagccaattttcagcctcacattgcaaatatttttccctttgtattattcaccactgtaacttttattattaaaatgttgaacattcttgcacacatacattgttaagaatatatttttaggaaatattgtgaacattattaagaataatacacataacccagatttattaatattttaagattttgccatatttgcttcaggatttttcttaaattagttaacactttatagaaagagctggagctgtatgtgtacctctttcttcttccttagaggtagccattatcctgactttgtcatttatgattcctatggatgtttatagcctatttctacatggaagaggagggaacattactctagatatcaaacctagacaaagatatcataaggaaagaaaactaaagatcaatatcttataaatatgaacacaaaaatcctcaataaaatactggcaaacaaattctagaaacatataaaaggaattatacaccatgggtaagtaggatttattccaggaatgcaaagttagtttggcatctgaaaattaattagtataatatattgtatcaatagaattaaaaggaaaatgtatatgatctcaatagatgcaataaaagcatttgtcataattcaatactttccaagaatttatacaccaycaacaacccattaacctaggaatggaagagaacttcctcaatttgataaagagcatttataaaaagcccacagctaacactgtacttaatggtgaaagactagattattttctcttaagatcagaaacaagactctctgactgcttctatttgacattgtactggtggttctagtcagggcaatgaggcaagaaaaagaaataaaatgctccgagattggaagggaagaaataaagctatctctacttgcagatgacatgatgttatgtacagaaaaatcttaagggatccaccaaaaactattaaagtgagttcagtaagcttgcaggatacaagatcaaaatgaaaatatcagttgtatttttatacacctgaaataaataagctgaaaatgaaattaaggaaacaattctatttgcagtagcaccaaaaataataaaatacttggaataagtttaacaaaagtgtgtaaaacatattatctgaaaactataaaacattattggagaaattaaagaggatctaaagaaatgaaaaaaatgttccatgttaatggatcagagggcttaatatggttaagatggcaatactctccaaactgacctacagatttaataatatccctataataacaccagctgatgtccatagaaattgacaagatcagtctcaaattcacataggattgcaagggactcaaaatagccaaaacagatttgaaaaagaacaaaatacggggacttacactttcaaatttctaaacttactacaaagtaataataatcaattggtgcttatgcaatatggtagtgacataaggctgggtatatatatcaatagaatagaactgagagttcaaaaataaacccatacatctatggtcatctgattttcaacaagagtatcaagaccattcaatggggaaggaacagtcttttcaagaaatggtgctgggataactggatagccatataaaacataatgaaattggatccttacctcatgccatatacaattcaattggatcaaagacttaaatgaaagtgctaaaactgtaaaatacttagaagaaaacataggagtaaatcttcataaccttggatttagaaaaggattctcacatatggcaccaaaagcacaaatagcaaaagaaagctagatgaatcagacctcattaaaaacgtttttgcttcatagcagcagtccccaaccctttttggcaccaggaagtggtttcatggaagacaatttttccacacactggtgggtgatgtgggggctggttttgagatgcaactattccacctcagatcatcaggcattagattctcgtaaggagtgcacaacctagatcccacacatgtgcagttcacaatagaggtcacactcctgtaagaatctaaggctggcactgwtctgacaggaggtggagctgagatggtaatgctcgcttgcccaccactcacctcctgctgtgaagcccgattcctaacaggccatggactagcatctagccatggcctgggggttggagaccccctgcttcaaaggacaccttcaagaaagtaaaaagacaggtcaaagaatgasagaatatgtttgcaaatcatatatctgataagggatttgtatctagaatatatacagagcatgtacaacccaataataaaaagacaacacaactaaaaatggacaaatattgaaaaccggaacaccacaaggatgcccactctcaccactcctattcagcatagtactggaaatcctagccagagcagtcaggcaagagaaagacataaaaggaacccaaataggaaaagaagagaaaagtcaaactatctctctttgttgacaatacaaccctgtacctagaaaaccctgaagactctgccaaaggcttgtggaactgataaatgacttcggtaaagtttcaggatacaaaatcaacatacaaaaatcagtagcatttctatacaccaataatagtcaagccgagagccaaatcaaacaggcaattccatttacagtagtcacacacacaaaaaacacctaggaatacatctaaccaaggaggtgaaagctctctatacagagaactacaaaacactggtgaaagaaatgagatgacacaaacaaatggaaaaacattccaagctcatatactggaaaaatcgatattgttaaaatggtcatactgcctaaagcaatctatagactcaacactattcctatcaaactaccaataacatttttcacagaattagaaaaaactattctacaatgcacatggaaccaagaaaaagcccaaataaccaaatcagtcctaagcaaaaagaacaaagctggaggcatcacattacctgacttcaaactatactataaggctacagcagccaaaacagcatagtacagaaatagacatatagaccaatggaacagaatagagaatctataaataaagccacacatcagcagccacctgatctttgacaaggtcaacaaaaaaaaggggaaaggactccctgttcaataaatggtgctgggatagctggctagccgtatgcagaagaatgaaactgtaacccttacctttcaccacatataaaaattaactcaagatggattgaagatttaaatataagacctcaaaatataaaaatcctagaagaaacctaggaaacaccattctagatataggtcttgagaaaatgtatgactaagtccttaaaagcaattgcaacagaaccaaaaattgacaagtgggacctaagtaaaagaaagagcttttgcacagcaaaataaactatcaacagagtaaacagacaacctgcagaatgggagcaaatattaaaactgcaatgatataccatctcacaccagccagaatggctgttattaacaagtcaaaaaactgatggtagtgaggccatggagaatagggaacacttatacactgttggtgggaaggtaaattagttcagctactgtggaaaacagtttgaagatttctcaaagaacctaaaacagaactagcattcaacctagcaatcccattactgggtatatacccaaagaaaagaaatcattctgccaaagacacaagcacttgtatgttcatcacagcactattcacaatatcaaagacctggaatcaacctaggtacccatcaaaagtggattggataaagaaaatgtggtacatgtacatgatggaatactatgcgccataaaaaagaacaagatcacgtgctttgcagcaacatggatgcagcaggaagccattatcctaaacaaattaatgcaggatcagaaaaccaaatattacatgttcttataagtgggagctaaacattagctgtatgtgaacatgaaaacaataaacaagggggactactggtggggaagggcaaaggttgaaaaactacctattggctactatgctcattacctaggtgatgggatcaatcatatcccaaacctcagcatcatgcaatatacctatgtaacaaacttgcatatgtatcccctgaatctaaaataaaagttgaaagtatataaaaaggatatattatctgattaaacatctctccaaaatagaatatacaagtgtcccataaatatatgaaaagatactcaatattattagttattagggaaatgcaaataaataacacaataagctactaatttgcatacattaggatggctacaatgaaaatgtcagataataacaaatgttgtcgaggatacacactgttatggtttgaatgtgtttgctccaaaattaaggtgtttaaacttaatggccaatgtgatgatattaagaaatagagcttttaagaggtgattaagccatgaggaatttgctccttgtgaatgtgattaaggcctttataaaagaggctccacatagcattcagttcatttgcccttctaccttccactatgtgaggacacagcgttcctctcttctggaggatgcagcaacaaggcactatcttggaagcagtgagcagccctcaccagacaacagaacctattattgcatttatcttggacttcccaacctctagaattatgaagaaataaatttctattatttatgaactatccagtctttggtattttgttatgacagcacaaatggactaaggcatggacaagcaggaattctatacactgctggtgggaatgtaaaatggtgtggctgctttgtaaaaacaatgtagcacttccttaaatgattacattcagagttaccatatgacccagcaattccattcccagatatatacccaagagagattaaaaacatattcacacaaaacttgaacctggaagtttatagcagtattcatcatagccagttcctcaactaaaatgtggaaacaacccaagtgtaagtgaatggataaatagataaacaaaatgtggtatattcgtaaagtgaaatattgccaggccataaaaagaaatgaagtacatactgatatacatactttcagatccaaacacaagtatgtgagaattctgttgttccagactttaccaccacttcacatcatcagacttaaatttttgcctctctgacggatgtgaaatgtatctgttttgtacttccttgactattaaggctgaatgtcttttcatgtttattgactatatgagtttttttttcttccataaatatcctgttcacatgttttaactatttctttttctgcattgtttgtcttttctaattgatttactggagtatttggagaccccaacctgggcactaggggttcacatagctccctgcttgtccttgtttctaggcctttttgtgaactacggtttttactgatgctccaaattcacattcaggcatagggttttaaaataaatgtgttaaactcatatctccaactcctttccctcatacacacaatagttttagaataacaatgccatgtgttctacaataataagagaagtgaaaattatttaagagcatttgccctattgtttttctaattctaaaagaaatacatatttaatatggaagagttataaaatagaaaaatcataaagaacaaaagttatttataatccartaacccatgtattatcaatgtgaacattttggaacatttgttattcttgaaaatggtttagatagtaaacttttgaatacaatgagcacctgtcccattatgtattttaaatgggagaataatgatgtgttctcagcttatataaaagtcccgaaccattcttcaaatattactaaaatattcttaagcatctatagaaaaattgactggaatttctgcaaacttaaagacattttaaacactgttgagttaacatttgctaaaatcataggggggtatatttgtatgttttatgaaacaatgttgcataacattggaaattaaaattgtcttttgcattgcaaagaacatgtactataatgtaaatcaaattattaaatatggttaggttgcataggaatgcaaataatatttagcaaaatgaaacaagtcaaagcaatttttaaacaaaatatttaattgtcaactgaatagctgcctgaatgtggtgggtaaagagaaatggaggacatagtctgttcctgtttgcggggtgaagggttggttggtggtggcttaagagacatgtgagtgaactggagatgggatgaataaaacagtaaatatattatgtttgttcttatttaaattcaagaaaccagatgttcaggcttctcttgttgcactcaagacatcagaagttggtgtctattttccataattcattaaagagaaatgtgcaacctcactcttagatttgcagtatctttattccagagaattctctttccttgatggagacctacacaatttcttttttgttcaatctatgaaattaggatcagccaggtggtcagcatgactaattttacttcttatacaagtagcattaagggaaatgaatgcctaggttttcattttctgcagggcagatgctggctagttaagcttgcctgtaaatcatagtttgtccataaactccagcatattctatttagaaccacagagcgaaaaactaataaatacatttaaaaatcttagtagacattaactccagagaggttcttaatttttaacttgatcaaaattttagctatgtcttagtggtttggttgaattwtaagcagatattgagaactcgcattgctttataaaatgcttgggccgcatgtggtggctcacgcctgtaatccmagcactttgggaggctgaggcaggcagatcacttgaggcgaggagttcaagacgagactggccaacatggcaaaaccctgtctctattaaaaatacaaaaattagctgggcgtggtggtgggcgcctgtaatcccagctactcgggaggctgaggcacgagaatcgcttgaacctgggaggcagaggttgtggtgagccgagatcatgccactgcactccagcctgggcaacagagcaagactgtatctaaaaaaaaaattcttaatatgctttataaaaatggacattccataaaatagttctgatttgccgaacaaaacctttttagtataaaacataaaggcgtgggtgcattataacaggtttctttttcaagcaaggtttagagtaaagagatacaaaataaatggatctatatctacgttgtgtggtaatactctaattcctacttactcttggattggggtcctgttgaattctgaagtcttggtggggaaatggtattgatgccacttggaaggaacaggtccagtaaaagttttaataggatggactgcattcctctttctataaaaacatacccccaggaaaagggatcaaggtccattaacctaatcaccatttccacactgtgagaagaaaataggctgttattttttattttttgccacagtgattagtttaagctctcacactctgggtttctgaggtctaatgtctgtttccatgggaacggcagtggcaggcagctgctaagttgttagacatctaataatctggggaagctcctgtctgaatgcaggccaagtttctccagcatcttgggtcatttagtcacaagtggctgtgcagcctgtagagacatcttggaatatagggagttgaaatacttgctatattgaaattatatatataatttttttattcatttaatggagaagcattgagtaagaagtgatttgaggccaggcatggtagctcatgcctgtcatcccagcgctttgggaggccaaggagggcggatcacttgaggtcaggagttcgagaccagcctggccaacgtggtgaaaccctgtctcttctaaaaatacaaaaattagtcaggactggtggtgtgtgcctatagtctgcactacttgggagactgaggcttgagaatcacttgaaccagggagacagaggttgcagtgagctgagatcatgccactgccctccagcctggccaacagagagagactctatcttaaaaaaaaaaaagttataaaaaasaagtgatttgaaaaagaaaaagggctttaggaaggacacagaatataaacaaatctcctgtcctcatgacacttaagatttatagggattcctaagtctcctgtactgcatactcaaaatgcagggtcctaagacttacaggaaatattatactcaaatgcactttcttcattcctgtcttgaccatctgtgctgaatcctcacctcttttcctattctgtgaactgggatgtataaacgaataagaaatgtaaatatcctggctgctaattccttgtaagtctagaaagtggttaggtatttgacttgtctcctctggttcttaccctggccattcttgttgctaagaaggaatgatgtctcctgcaaagagcccaccaaacacatttctaccctaagtagcctgctcaaaactcatcaaaagccctactaagaygttttgctgcactgaaccctttcattttatagtttcctcatttagaattccctttcacacgtccattcattcattcaacaaatattaagggtctactatgtgccaggcctggtagtaagaatttggtatagacataatattccttcaagaagcttaaagccaggcacggtggctcatgcctgtaatccccacactttgggaggccgaggtgggtggatcacttgagcccaggagtttgagaccagcctgggcaacattgtgagaccctgtctctataaaaaataaaacaattatctggatgtggtggcacatgcctgtagtcccagctactcaggaggcggaagtgggaggattacttgagcctggggaggcagaggttgcagtgagctgagattgtaccattatgctccagcctgggcggtagagccagaccccttttcaaaaaaaaaaaaaagcagcttagagcttgatgggaaaaagctattacaggaataaatgcaaaacttgttatacaataacaggctacgttatgtattatgaggtttctgtggaaaaagaataagggatataacctaatttatattggggttgggttcatagaggctattttctacagccaaaatccagatatagagtctaaaatacgtggagtgagatggacaagagaaagaaagtgtcttgaattggttttttcccccattgtctcacatctctttttgcctttgcagtcacatcaattgagcatctttatggtggcccatttgtgctctttcatcagtttatgtcttcggttgcttaacagattcctctttgaggaagctgagattatgggggagggtttgagagcagcgatataggcacttagcaagaaaataacaacctacaggagcctgtgtgttataggagccttacagacagcaagggtgcataaagtcaatgttgagatggctaaggcaggcttcattgagaggaaaggacataggctcggctaagaaatttcttctctatccactgttatgttctgaaccagcagctatcaggtccagaggttttctagctgtaccctcttctctcccctgtggcagggcagatgtagtatccagggtggcctggctgcaggtcaccaatttagaactcatatgatggtccttggcaggtgcatggcaacgtaatccattcaatcacattgcacagtgataagtcactgcatgtgcgacagcagagaatgagccccgcctgggaaatagcctgtatctttccacttgtcctgactgattaacaatttatgctgcatgagtagaaaataattttgacctcattcactttattgcttgtgaaatcatggcagtatccatagactttttgcttaaacatttatattagtaggcatttttgtgttttcacatggctgcatgaaatgaacaggcacttttctaatatgaacatacagtgaatgaattaataactgtatgtttctaagagccacatttctgttagaactagccatataaggcatatgactaatgaattcagatatttaatattgaagtttaggaaaatgtcatttccactgggctgagaattagagtcaggagcaaatcttyctatctccctctyctacacattcattcattcagcattgtgtgcctattatatgtcaagatagtataatgtatatatttaatattatatatagtatagtataatacatattggcacataaatatgttttttatatatatataatcatcgayagtaacatgtttataggcaatagcaattcaatgtggcaagttttatgacaaggccatacacaggatgctatggagcatggaaaggaaggagtccctgagaacatgtcatcgaaactgacttcaaatggagatgtaggtatgagctggttgttagaaacggaatgtttgtgtcaccccgaaattcttgtgttgaaaccctaacccctagtgtggctacatttagagatggggcctctaaggaagtaattaagtttaaatgaggtcatgggagtggggccccaattcaactggattagtgtcctcataagaagagacatcgaaagccagctctctccctctctgaacatacacacaaacacgaggccatgtgaagacatagcaagaaggcagctgtctgcaagctgggaagagagccctcaccagaaactaaatttaccagaatcttggagttttagcttctgaactgtaaggaaataaatgtctgctgcttaagccaccaagcctgtggtattttgttatggtagccttagcaggctaatacagtggtaaactctgcatatggaggagttgaaaaagagagagtagatggcaatttgggcagaaggggaattacctgcaaatgttcaagggagtggagataattcttcttaaactgtttatcagtccttcaggagataagttaacaacagaggataattatcccagagarctggtttctggcaaatgtctgaagggcatggtaggtcataaaatacccactggtggtattttatattctgaaaaccattttaatctacctttcatgacctggatgcttcagcctcctgtgcttcctcagaatttgataactgacccatgagacaaaaactgatcktttatctagaatcctctagattccagtacaactcagcagctgtgaagcctctaaatttgcaacttgctttcttttaaactcagtagaatccctcagccagaaccaatcctcatgccaattttagaactgttcgatattcccaagaaaagaaaatggctggtgattgtcaactctcttaagaaagtctcttattttgggggggtggggtgagggggtgggggatggactctcactgtgtcacccaggctggagtgcagtggtgtgatcttagctcactgcaaactccgcctccgggttcaagtgattctcctgtctcagcctcccaagtagctgggactacaggcacacgccaccatgccctgctaatttttgcatttttagtagggacagggtttcaccatattggccaggctggtctggaactcctgaccttgtgatctgcccacctcggcctcccaaagtgctgggattacagctgtgagccaccgcgcccagctggaaatgttcttttgactctgaaattttagttcatcgagtccwcattgacttcacagctctctggtatctttaagtgtattatttttgtaatttatatgcttttttttcctggttactagcaggaacattgatccaccataaccaatttcatgtttctgagaagtgaagctcattttctgttaaagagaaagagagacatgaattccaaaacaggtaaaggtgtctataaaccagtaagtttattttagataccaagcaaaattctagaacttattatttataaggcagatggagagttattataaagggcacagtaaaaaatgtctaacataggattatcgagagcatatcatcactaaatagttctattttttttgacaaggctacagaaaaatagataatgtctatctgaaattcagaaagacatttgacaaagtttttcataatatccttattgccaatataacgagatgtgaagttaatactaatacgttcagatggatttagagtcaaaagattttattttataactttttaaagagaacagtgtgagtttgaagacatgtttctgtgagtggagtacaaagcttgttatcaaggaaactgggtggattttaatcaatgagtttgatagagacagagcacacagatcatgtaaagttggagagaatgccagtaaattgaaagacagaatcaagaaccaaggtatcttctgtaagctgcaacaaataacacttaatgggtattaatgtcatatcctacatttggataaaataaaaactgttaaaatgcaggctgagaaagacatggcttaataagaatatgtgttttaaaaagccttgggaagtattgttggcttgagctcagaatgagtcaacagggtgacatggccagcaagaaggccagtgggatttatagcaatgctgagaagggcagagggtgcagattgaatatattgcactggtgagtgcattatcctgaatactgcatggacgcgtgctgttgcattctgctctgagcatcatactttaggaaggaggaccatatatgaagcttgccagaggaaagtaactaggatataaagcatgagggaatgtaaagacatgtcaggaaaagagttgaaggataagagagtgtctaacttgggaaagagaggctttggaagatggaagaggtatcttccactgcataagggattgctttgttattgaggtcagagctaggacagaaatatagagaaaaaggttttattgctaaagtgcagaggaacattttcaaaatagtgataggtatgtaaattttgaattttgaatgagaccacttagcgtagtgatgacgatttaggaatttttttttttttttttttttttgagacggagtctcgctctgtcgcccaggctggagtgcagtggcgggatcttggctcactgcaagctccgcctcccgggttaacgccattctcctgcctcagcctcccaagtagctgggactacaggcgcccgccactacgcccggctaattttttgtatttttagtagagacggggtttcaccgttttagccgggatggtctcgatctcctgacctcgtgatccgcccgcctcggcctcccaaagtgctgggactacaggcgtgagccaccgcgcccggcccgatttaggaattttaaatcaggaaaaaatttaatattggaccctcttgccacttacaagctctatgattttacctaatcttttggattctcagttttttaaatctttaaaatgagaataatagtactgtttgttaagggtcattaggtgatcaaaggaaataattcatataaagtgcttgccatggtgaatcacacatttctatatgcttaatatgtatgaactatgtttaagttactgagatgtggtcagaaagaaaagcaagcacctggctgggcatggtggctcacgcctgtaatctcagcactttgggaggctgaggagggaggatcacttgaggccgggaaattgagaccagcctgggcaacatagcaagaccccatttaaataatatataaaaagaaaagcacttgccccttacattggcaatagttttattgcaggaagtaggaaactaaaccccaactcagaatttagacttgctgccagaaaggtaggtgccaggggagctgatgtaatcaagtgtcaccaattagagtctacagatcatgaaaagtaattctaggagattttcaaatgccttttttaacctagatcttctgcttggatgaattcatactatgaatttaggaaacatcaattcatttattccttctaggtggccagcattttaacaaaattacacatgtgtatacaagcatgcatcctggatttggtgagcacacataatttcaaatattctactctttgttccttaacatacattatcgttttaagattgatttggctggaaaatacaaccacagtttatgtatgtcacattctttttttttttttttttttttttttgagacagagtctctctctgtcgctgccaggctggagtgcaatggtgcaatctcagctcactgcaacctccggctcccgggttcaagcaattctcctgcctcaacctactgagtagctgggactacaggtgccaccatgcctggctaatttttgtatttttagtagagatgggggtttcaccatgttggccaggatggtctcgatctcttggcctcatgattcgcccgccttgcctcccaaagtgctgggattacaggcatgagccaccgtgcccagcctatgtcacattcttgtggtactgagattgtcaaaattcttttctgttaagaagcatggttcaaacctactgtgaggtactattttgcactcacaagttctgcaaagattgatgtaataaatggaaaggatatagggcaatggtaacttgaaactgctgttgggagagtaaattggaatattcattgttttactgctctaaatgttctcatcacacacaaaaaataagtatgtaaggtgatagatatggtaattattgtgatttaattgttctacaatgtatactatatcaacacattgcacaccataaatatatacaacatacatttgtcaattataaaagaaaaatattggcaggaaatattgtgtatagaatgatatatacaatatgattctacttatataataagttagttataaatcaatagttatgcctatgggttttaaaatatggagccaagacttatgtcttgtcttttttataatagccatcctaatagatggaaggtgatatctcattatgattttgatttaagttttcctgatgaattgtgatgttgagcattttttcatatacctgtgggccattggtatgtcttctttttgagaaagggctcagatcctctgcccattttttaatcaggttatttaatttttgctattaattctatacattctattagtttcttttatattttggatattaactccttatcagacatacggtttagaaatattttcttccattagtaagttgattcttcactctgttgattgcttcctttgatgttcagaagccttttagtttgatgtagtccactttatttttgtttttgttgcctgtgcttttggggttatatccaaagaaaacataacccagtccaacatcaggaagatttttccctgtgttttcttctgggagttttatggtttcaggtcttatgtttatatctttaatttattttgtgctaatttttgaatatgatttaacataaggattcaattttgtttttttgcatgtggatatccagttttcccaatgccatttattggagcaattatacttgttccattgtatattcttgctactattgtcaaagattggttgactgtatatatgtgggtttatttctgggctctcacttttctaaaactgggtatgataagacctaggtaactaagacggttgggtgagcctgaaagaagggaaagattgccttaggttaggccttatagcttaagaggcaaaaggaagtctcaagtctcctgtttgcttcagcccattaaccaggtttggagatcatacagaaaattaaggtttaagtgctaactagcagtgaaatgtaataaaaaactagttatgactctactgtggttttaaatggataaatgagatcgtgagtccaaasattcagaaactctgatactgttcatattgagagatttaactaaaaataagtttctgctggagagaagaatgaaaggtaagtacagaggaaggcaaggtacaaaggagattttctgagtccagtcagggttagcgtggagaccctgtgcacttggggaaatggaaaaagtggcaataaagagcaaattgtagatagaagcaatgaaggcccaaactggtaatgtcacacttttgctttgagcaggctggtaatgatttccccaggaaactcaactatgcaaataagaaagcttggaagtatgacttaacgattaatgaagctcacactactttgttcaatggaaaatttgttcttgtctaaatgtccagakagtaacttggttctttttctccagggttatgcagaacagaggagacgcttttctgccagctggaaggggtagcaggtggggtaatggattcccagcttgccagcggctgagattctaattagaatcttccttctggcttttagcaagcagctttcacttcatagtgtccttagagaagaaagttccatattcagcaagaaactgccctatttaaatgtataaaatctttttgtgtttgggctataaagcaagtggtcttcaaggttcatggcaagtatatcgtgtaatataaaaagcatcattagctcatgaaaatgctatttaaaaatgcaagtttgccttaggtaataaagttgaagaaagtagtctggaaatttaagacagaattgggaaacttaaaaatttagattttttagtttatatattgtatggattttaatatacacagatgaatggtgaagctggtagaaggagaaagaaaagagagatatggaggtgagggagggtgaaaatgtgcaatagatgatgacagtgttggagaaggcagaggtttttgccataaagaatctctagctgggatcacttgaggccaggagtttgagaccagcttgggcaacaaagtaagaccccagctctataaataaataaataagtaaataaataartaaataaataaataaataaataaatcagctgggcatggtggtgtgcatctgtagtcccaactactcaggaggctgaggcagaaggatcccttgagcctaggagttcaaggctgcagtgagctatgatgtgccactgcactccagcctggggaacagagcaagatcctgtcttttaaagaggaagagagagagactgactccattgggctttttctttttcacgttaaataaaatttaagggtttagttgtttagcctgtactgccttctcctggttggtcttggattagcagctcagatgtaacaaaagtgaactgtgtgaatggacccaactgtaacacagacgttatgtgccagattatgctgcctgcctgttgcagtttaccacggtgctggtaatatatccaggtcccattgggctggcttcaggccgtgatggtctttttttcatgagccttcctattgtgatactatgcatatattagtaagacgtcttaagtagaatacctattccaaaatggaatgaggcacatgtgtgcatactgaggtgcctgtgagttgcttacttctaaaagagagaggttacacaaaatcttaagcccttgtaatgtacttaatcttgtaaatgtgctatgggaacatttattgcaggcctccagagttgactttaatttttcttttatgacctgccaggagtagagtggagagattaaactatagcttccagaatcacagacaaatctgagttcgaagaaaaggtgatcctttctcagtgagaattctcttgcttaatagtcagagagattttgggaaattctgagagtgatgcctataaagtgaaagaaaaggaggagactgagaaaaaggaaacagaaaagcaaagttattgatttttgagcaggtaaaaccgaaaaactcattctatcaattatctatctgtctgtctgtctgtctgtctatctatctatctatctatctatctatctatctatctatctatctatcatctattgtgaaaggaactgctcagggaaaacttgcctcccatttctattcaaagtcatccttctgctcactgcgatagatgcatatctgattgtctcctttggaaaggctaatcagaaactcaaaagaatgcagccttcatctcttgcttatctgtggcctggaacccccgtccctgctttgagtcttcctgcctttgcttcaagttgtctggcctttccagaccaaaccaatgtacttcttacatatattgattgatgtctcatgtctctctaaaatgtataaaactaagttgtgccccgaccaccttgggcacatgccgtcaggacttcctgtgactgtgtcatgggcacgtcctcaaccttggcaaaataaactctctaaattaactgagacctttctcaaattttgggggctcacactatctatctatctatctatctatctatctatctatctatctatctatcatctatctcctacctatcatttacccatccatcgtctaccagttatctatatatctatctcattatgctgccagaaattgtataatattgggaacctatctttaaggaacttaaaaagatgaaaaagaatcaggaaatgctgatacaaaagaaataaatagagaatgaggagcagtgctggatcctggctctggctttctgttaagagtgtctgtgccttcagaagtgctggagcaggaagggttcatggacgtggctgggtcataagtaaaagtctatgtccaaatggtggaaacttgggaggtctaaccagtcaagaattgtaagcagctgtaggaaacaatacaagtgaagaccgaataagagctaagtaaaaacttggaaaaagcccctgtaatcccagcactttgggaggctgaggcaggcagatcacaaggtcaagagattgagaccatcctggccattatgatgaaactctgtctctactaaaaatacaaaaattagctgggtgtggtggcgtgtgcctgtagtcccagctacttgggaggctgaagcaggacagtcgcttgaacctgggaggcggaggttgcagtgagctgagatcgcgccactgtactccagcctggtgactgagactccgtttcaaaacaaaaacaaaacaaaacaaacctggaaaaagaaaaaaaaaaaaacagaagagggaatcagaaagttaatgtctgatcatatagggaagaggccagaggagcagcagggaaatcaatctgggttgaatctggcagaaaatgcatacagagagagaactcagcatgggagtttcttgtattttcaaatgacttctaattcctggttactccatgcacagaggttgtactcctggagagcttaaaggtaacaaatagctttgatggaatgtggctgcaaagatattaaccttcctacagaagagagattagcagcagacatgtgcctattgtgtgtgtgtgtgtgtgtgtgtgtgtataaaatcagtatgttcaaataaactgtctgggttgctgctttggtttgtgctaattattttgttttcaaagttttaggaaagaactccatttatattgttttaaagaaaaaacaaagattgactgaggtaaacttggagtaagtataggcataatcaaatagggtcccctagatcaaagctcaagcctgctggtttatcaatgagatgtctttgctaaagagttgattttggatcaggggctatgttcatttaataaattacaagtgtgaaaaagtcacagagatactataaagtgatctgattatttaatttttggaatataaagatatgggggagacttgtctcttgtttattataacagagcctagaattgaataaataccaactagtgatggtaacgtgaaaatcttgatcactgcagagattaaaaaaaccaaatctcatagctttacccagaggcctaataagggctaaaataactaattaaaaaaatgaataaaagccaagccaaaccgcgagaggatgatctaagttaaaatacgtgaccaggcaggttgcttcagtcgtagtagaaatattttaataagctaggagcaagatgaatatggagtattaataattgtaattttctttcatagttaagatatcagaaaccagtgagatatctcatagcctgtaaaagcagagcctctaattttaagagccaatttattttactataatttgagatgctggaaagacttttgagattgttatttaaatgccgtttgctattaaactgtggttagaaaatctgctcagccaaaatgatgctgaaagagcattaagtttatgagtcacaaaagccagagtaattctaattactttcctgaacttcagtacaatagagatgtttaatatgcaatgggacactcctttaaaattgttgcaagacaggtgatmggagtcttggcttctctccccaccttgattatcagtgaagtaaaggttaggtgcggtattgtattgtgtgttttcatcttaaagtttcttcttctgcagaatgggttaatgatggaaacatttgggtattgtggtgcacagagtgggttctcgtgtctcttcagagcaaagtcctcttatacatcatcatgagcctcataatgacgtttcggtcaatgacaactgcatatatgatggtggtcccctaagattacaatggaacagaatgcatagctgaagaagagccaagagaaaaggaaattgcaggagaagaaaaagaagaaaattcacagtgaagggtttagcagaagcttttgcagacctcaacaagcttcttaaaaatttgaaaatatggactccaacaccaaaagattttcattaatagagagaaatcttcagggtgcattatctgctcccaggcagataatctatgatgaaaaaaagaaacaaactaagaaaccatgatgaacatattcctgaaaaaagtgacaccttctcaggaagagcctcaggcaggtctttcaggagtatccagaagaaggcttgttatcacaggagatggcagcaccatgtgtgttttaacccctggagaccgtccagcaggacaagatgtggaggcagaaggcagtgctgttgatgatcctgaccttgtatggggttaggctaatgtgtgtgtttgtgtcttagtttttaacaaaaacgtttaaaaagtaaaggaaaaaaaatcttaaaaacagaaaagagcttatagaataaggttataaagaaagaaaatatttttgcacagctgtacggygtgtttatgtgttattacaagagtaaaaaggtttagaaaatttaaaaattgataaagttgaaaagttacagtaaactgagtttaatttgttatttaagaaagaaaaatattttctataaatctagtctagcctaagggtatagtgtttataaagtatacagtagtgtacagtcaagtcctaggctttacattcactcaccactctgtcactgactcacccagagcaacttccagtcttgtaacctccattcatggtaagtggcctatacaagtgtactattttttatcttttactctgtatttttactgtaccttttctatgtttagttatgtttagattcacaaatatttcccattttgttgtaattgcctacagtattcagtacagtaacatgctgtaccagtttgtagcctaggagcaatagactctaccatatagcctacatctgcaataggctacactatctaggtttgtgtaagttcactctatgatgttcacccaatgaagaaatcacccgagacacatttctcagaacgtatccctgtcattaagtgaaacatgactgtagttaagtgaggttataatggtttagaatgggtcctaaatccaatgactgatgtctttttaataggccagtaaaaacagagagagacacagaggtccacataggaacaccatgtgaagatggtggaagagattgaaatgatgcatctacaagccaaggaatgccaagacttatggtagttgtattattattagaattattttttatgctattattataattggtagtgtttcatacagtatttattgacctgacattaatatttgaccagttttattttttttctttcactgaaaaacctaggtccattcttctttttttcaagcatcattttgtatgagtatgttttagttgcttctattgtatatttaagacttgactccccaagaaataggaacacttttacaccgttggtaggagtgtaaattagttcaaccattggggaagacagtgtggtgattcttcaaggatctagaaccagaaataccatttgacccagcaatcccattactgggtatatgcccagaggattataaattctataaagacacatgcacatgtatgtttattgcagcactattcacaataacaaagacttggaaccaacccaaatgcccatcaatgatagactggttaaagaaaatgtggcacatatataccatggaatactatgtagccataaaaaagaatgagttcatatcctttgcagggacatagatgaagctggaagccatcattctcagcaaactaacacaggaacagaaaaccaaacactgcactttctcactcataagtgggaggtgaacaataagaacacatggacacacggaggggaatatcacacacaggggcctgtcggggggtggagagaaaggggaagggcattaggacaaaaacctaatacacacagggcttaaaacctagacgatggtttgataggtgcagcaaaccaccatggcacatgtatacctatgttacaaacctgcacattctgcacatgtttcccagaacttaaagtaaaataataaaaaaagacctgactccccattcccccaattttgtaatcaaataagagagtatttacctctttattgggaaatatatataatgcccatttttctaatatcaaagttgcagcttaaatatatatatgtaatacatatatttatattagaaatatagttgtactttacacacacacacacacacacacacacatacacacacacacatatattggagataagagtcttgatcaggctggactcaagcactcccgcactcaagttatcctcctgcctcagcctcctgagtagctgggactataggtgtgaaccactgcaccctgcttatagctgataatttaatatgaatttatcttagctaatctgcaaagaccctattgccaaataaggtcacattctgaggtttgggatagacataaattttttatatttgctatagttagtgttctttttttaatttatattaaataaatgcttctgttttgaagcatttatattattaaatgaatattatttatttattttttataaaataaatttatatattaaataaatgcttccttaaagtttctatatttcctgtctggcttccttgttgttatattgctaaacttgtttgggaaacatattttgtttccattccatgggtggttactcaaaagttttttcaactatgtttaacgtgatgttccaagggtttttttggggagtgtttccccttgacataagaagtttaggatacttttatttttacttctccagtaccacaacattcactcccttctctgaattctgtcttttacactgatactgttttgtaatttagatactgataattttactaacaatattatttttatattatatatcttctctttggggacatattttgctttgcattcaattttatatcaagacattaaaatttttcttagctttaatatgtatttttaactgatcttaaaggattctgttaattctgttctctcaatcagttggagtatatctttgagtaatttccttaaagagaagtatgtttcctgagctgttgcacagctgacttttttttttcttttttactttgaacttgaataatagcttgaattttgctccatttggttctggtgttttgtgttttgtttttatttttttagagacagagtctttctgtgttgcccaggctggagtacagtggcatgatcatagctcactgtaaccttgaactcccagactcaagtgtccctcctgcctcagcctatggaatacatccagctaattaattttgcttttgtagaggtagggtctcactatgttttccaggctggtcttgaactccaggcctcaagtaatcttcacgtttccgcttcccaaagtgatggttagaggtagctaaataaagaattctatcactgtcattattactattcaaaaatattacgacaatgtcattaggtataacatttcttcttattgatttttcttgggatagaaatcttttttgatttatatatactggatttctgtaaatttagattttcttctaatgattcacttattatatttcttgctggcttcttcagaaacaaatattatccatatgatgtctcctttttcttcatcttctatattgtccatattttctccaattattttaatctgtttatacctttattctatgctgacatatcttcttgagtttcacttttacagttttgatttgaatttcttctccatctatttttttccattaccctccatatcgattaagttacattaaattaagaaattatttctcttacgtttttcttgggttccttgtttttatgtttttcatatctcaactaatctttcttattgcttataaaaatcttgttctattatcaccttattcatgaaaaaactcaaaattctgttttctttagataatagcatatagtttcctaaaattcccttctgaaaacttttagagatctactttttggaagcaactctatttaacttaccccattatatttcttatttgttataattttatatttttccagtcaaagattggcaaaatatatttttgacaagcaaagattctctatacttatttttcattagaatgggtgtgtgtgtggcccttggtcacattctgtctattgatgtgatcttggaatttgtactttaaatccataattgaaaggctagttggtttgtgttgttcccagtttaattctcatttgtaagcaaatatcctcctagtgctcctttgttctagtgcagttttatcttctgagtgctggaaaacctctacttcttgagaagtatgtgttgttactaggatgttgttttttccctctgcatatattgctgtcttcttaatggaaagtacacctctctgaaaactctattctctattttctgcccatttgttctctggacttcatagaaccttcttctatgtggaaagatagtgggaaaaaaaatcatgcagtggtttgtatgaaaaactacaccttttgcctaacagcaatatctaagatgtggagagaaataattaacctgttttctggctagtacaggtgttggatccttgagtatggggacacatttacattttttgtgcatctgtttctatttcatgtaatgatactgtgtgaagtcaggaatagaattctaagtaggattttcctcaatttaacttctactgtcttataattaatttccatttatcctgcattttggctttgaattatctgtcagtgttagatttcagagtttttgagagcttcttttttttttttcctcttgggtacgcctttgtaagtatttaaaggttagttggaaagaatggtttggagaatgctacccagacactcttttggattttaagtctctctactgattcaaaatgctatttcagtaatctcagttgtaaatgtttactatttatttagagacaaggtcttgctctgtcattcaggctggagtgcaatgatgtgatcatagctcactgcagccttgaacttctaggatcaggtgatcctcctgcctcagcctcctgagtagctaggactacaggtgtgcaccactgagtgtggctaattttgtttattttttgtagagatggggtctctgtcacccagatgggtgtacaatggcacaatcatagctcactgcagctttaaactcccaggctcaagctaccctcctactctggcctcctttgtagctgttactatcgtgcacaccaccatgcacagctaagtttttctatttttttgtacagacaggctttcaccatgttgcccaagttgatctcaaaatcctaggctcaagcgatcctcttgccttggcctcccaaagtgctgggattataggcatgagccatggtgcctgtcttattcttttactgttgaggaaaatatcttcaaaaagctcatttaagaatgaaacatagtgtgagaattcatttttgagttgtagcatgtctaagaaggtatagaatttttggatagcatatttttttccggcagagttctagaaatgttactcctgtgtcttctagtgttttgtattaaggaaaacaaatgcatggccaggctgattattaatcttttgtgaagagtctaatatttttcatgttgatttttattcctttgtgaagaataaatatttttaagagtatttgtgggattctttcatctctgaaatttgatatttctatctgattaagctgtgtaagtctagttgtctagtttcttttcatgaggtttttcctaagcatcaaaaaatacgttcaaaattttatgctagtataaatttcagattgggaataatttttttgttatttctctgattattgattattttgttttctgatgcatactcttataggagataacatcttctagaattattcttcatgtatcttatcttctacctccttttgttcatgtctttatcttcttctgctaattctgggataatttgttgagtttatcttctccagcactcattcatttcctgcatatctttcttactgccatcatccagttagtttggcattatgttttttgacctcactsggacctttctaatttaagtcttcctttgtgaatatttcccagctacagagatgccatggcttcttgaacccttctggaagagaatctaatattttctaaaaatttcttctgaattttggagtaaccctattttaaaaggagatattccatcattttttaaaacaatgactcacttattttggacaccactattttctcatatactttggatttgctatttttaagagaaggaggctcaatgctgatattaatcaagtaggaattgaggtaggctaatgtttgtgtgtgtacttttcactcatttttagaaggacccttagcttcagagtccccagagtcttgaatgaggtgagaagtggaaattcagaaggttggaatgccctatatagtcatcacataaagttttaacaataccgcacatttatagatgaattactcaggaaattcattctcctctctatactgcctcatatatttctactccatgtcctcttctgcttatcttgactcccattccagagggaaatctcaggcagagtttctaatttttaaatttctgcctgctttggggctgccaatttcaggaaggtatcgctgagtctttcagtattgccagtggaatcgaactccagaaaaactcaaaggacaccacatggctatctccccagtgtccaatagcctgttcccaatgccattcccaactcttctaaattcatctggggcttaatagactctccccatcccaactcttctaaattcatctggggcttaatagactttccccctcatagacttccatgataagctgctctgtttcacaatagggaagcttacacaggcctttccttcaatctcatcctgccctccctagctaacagaaattyctagaaatatctagccagtgagagcatccatttctagtttcatcctataatgttggttttcataatgttggttttaaatgtaattattcattacaaagtatttgtgagggagtagagaagaatgggtacttataataaaagcatgactttttaatgtatcaaaactatacagaaacaaagacaacatagagataactcttgaagaagacagaacatcaacatcataagccccatttccttattttgaagtgtgggtcttctattcaatttctacaatagatttcaaatgtaatatttgataatgaaggtgatgataacaatgatattgatgataagagatgatactgatgagcacacttaagtgcttaatttatgataataatcattgttaacattcattagccttattgtatatcaggcactgtgctggcttctttacacacatgatcccagtgaatctctgtaacaggcctataagagagacacataaatttatcctcaccttatatatgaggaaaccaaggaacagactagttaagtaaggtaccagaggtcacacagatagtaactgacagaactgagacttgaatccagatcagtctggctacagagcccatgttcttatctactgtctgattaaaaataatatgacacatgacaggtacaagttacatgagaattcctttgacatgtgaatgaatggttctttgaagacagagtgcagtaaattccagtctataaaagagttttttgaataatatgatgaccaaacttgtgtgtccagggcaaaaggagggtacaaatagacagaatatgcaagatagagwaatgctggagttaagtctcagatatctttgaagcaagagtttcatccttaatttgcttggtgggcatgtgtttcttacatataagatttttatgtttctgaagcccagaggataagatggagaattcagctcagggttggcctaagggagggaggtgaactagcgagaaagaaaaaggtcccataagacaccccaggaagaaccagactactgaggaagattcagactgttgaatattatgttaatgaagacaactgagtcactctatgcctagtgtttatttcttttgtacttaaagattccagtgttttctagtaaaaataacatgtctgtactaaagggacaggttggcaggagaaatcattaatgggagatggaggatggccctggactatgtgtgtgtgtctctgtcaagtcgtggtgggaacccaggggaaaggctttatgtttgtgcagattttttattttgactcattctatgtattaagaaatatggagaagactacaggcatattttatcttataggttaaaaacaatgtaaatgaccttagaatgacttttgtgtgaggagcactttaaaaaaaaatagaaatctttagtatccttgaacccctaatgtgattaggtctaattgtgctatcagtataaatatgaacaatcatggcattagaagctgtaattgcctaattatgacttgcactaatgtgatgatttttgttagatctgaatcctaactaataggactagtctgccaaatctgaagtcagaaataaaagtcaaatcaagtattattttgtgtccctgggtaaattcaccagtacaatttctccatgagctagagaccctggacttctggcttttctctgctatatatcttataccatcccactcaggatgtgggcacctgatcattcaatttaagtcattcgtggatgactactaaaggaaaatggcagtaaaggtattgaattagtgtggatttttattagcacaatattttattattctttaaaattttcctaagagctgattaacataaactctttgcagattgaaatcaatcctctcatcaggtaaccaacataaaaataatcagggcattcctgagggatcacatataaaactgacagaggcaatgaagtgtcctgcccactttccagcatgttccttatgatcacactgccttcctccgtacctgttttatctcacctgccaatgtttatttgtttcctggaggaaagtcttacaaagcacactccctaaatattatttgaaagtccagatgtacaggaacatttatttctcagcgagtgagttgtccactagtgcaagaagcagaggcaatagttcatctctctctgtctttggaaaatttggtgactagcagttaacactcatagagagaaaacaatgatgtatagaaagtccagcgtggaagactatattttctccactttcctggtctatttgtgatattttagttgcttcaacaatgactgaaataagactggttatacacaaggctgactgcttggaagcattctttgttcctgggttttaggtgtgtgagtgtgatagaagactcctcagagatcctccataataaaaccatctagatgacaaacagaatgatctgtacaacaaattctgaattataatgggtaaaatgaaagcaaactccagagtatttctttttgtgtcctacagcattagatattttgtctggtagccacatacgcaagacccaatctcgtttcagtctaataaattacataaagctatttttgcagtcaattagcatgctgaatgtttcaacttccacatgcgcattctctttcttttctacagtttgtaaactgctggagaggtgtgttaacattctatttcaatgtcacagtgagaggaagtggtgataatagaaggcaggggcaggacatgttgctttctcgatacttttttttctgtttttcttttttcttttttttaaagaggtgggacctctaaacagatgagtgttagctctaagtaaaatatagttctaagcatcacaattctgtgcttatattttaataggtagttggtgtttcctagggcggctataaaggtatcacaagctgagtggcttaaaacaacataaatttattttcttccagttctagaggttagaaatctgaaatcaaggtgttggtagggccatactctatctgaaggctctagggaaattcctccattgcctctttctagtttctggtggttgcaggctgtagctgatgttctttggcttatagatgcctcgctccaatttctgcctccatcttcatgtggtcatcttcctagtgtctctgtgtccaaattttcctcttcttagaagcacacccaatattggaattgagttcaccctaattcattatgacctcatcttaactttgttacattttcaatgactatttctaaataaggtcacattctgagatactgggggttagaactttcatgtcttttgggggaacaaaattaaatctgtaacaaatgacaaaatggaaagtttcattcttgcatttgctcagagaagggtccctaagggaatagttacccatcagatttagcaactttttcctagaagcctcatgagaggggtcaggatgaatgcacctgttctgcatataaggtaggcagccaccctccaatatcatcaaattcaacactttatagttaaaaaaaattagcccagaatcttaaataagctacaaagtttacaaacaactaatgatgaagaggctgagagtggattccactgttgcttgatttctggcctggagttcttccttcctgctcacactgtgggggcatgttgaggtgcacaatgcttctgtggttacccagtaggacagtgacagcttgggatgcctcctgtcacactgtgaatcttgtgaagttacttttaggccaccttgtgactagccacttcaaagtctttaaaagacaggaggtataaatgaaatgaataaaacaagagcttaagctattatctctcctctggggcatttgcattttaatggagcagcctgggctctgtcccagacctattgattcataatctccaagggagagtcctgggagaatctgtattttagagagcataccaggtgactcagatagttgggcatgtttaggaaacactggcacagagaaattctgacttctgaaatagtaagaaagaaatatttactggaaggattttaggtaagagccaggtggggatggtgggggaggaagggaagctactacttgatggcctccaaaaaacacgagtcagatgcataattctgtattctttgcccaaagtctgaggcctggtttctgccccaggaggaattcagaggaagcaggttttctgggcttggagtgtagtatccctcttaggagaagcaagagagatttaggattgcttatttattgcagaacccacgtcttcttgcagattgcaaagccaattctgaaactgcctttgcaaaaattaaaacagtgaggaaactatgacagtgaggagatctgtctaactaactcccatcttgccttttaaccttccaactgcccttcatcactcctgggctcaggccacgctaacttcgaaagacatttattttgtagtttaaatgataatagcccttctcccaaactaaaccaccttggtacagctgataaaagacaaccaggttaggaggatgagcaatctgaattctgctcaggtgttgacctaaaggattacccaccatgattccagaagtcacaagatttgcaaatcccccaattattgctgcagataacatctctggaactaagattggccttttgagatgttttttcaggtgtttgcatttctgatgaccaatagcttcacctggacctccccacgccctctgaccagtcctgtggccccacccagaagcggactccctggcccaccaaactattattgaaaaaccatagcctccgaattttctgggagatcggtttgagttattactctgtctcccacatggtgtggctggccttgtgtcaattaaactccttcttcattgcaatgctgtggtctcctgagttggttttgtctatgcagtgcaggaagaatctgttggctggttacaattttatattaagggagggtacccaagagaaaattctagcccatttctattgcttcatttttcacattgcatgcagtcagtggtgatgtactttctctctctctttttttagagagagagttcctttttttttttttttagagagttcctcattacttgttttgaacctaaasttataatttagtgtctgtgacagcacatttgattgtttttaaatgaaggtgataggaaaggcagaagaatgactagggaagaaaatctggagaacagatgacaagataacattgcttttgattctctgcaaacaagcatggtattgaaaaatgatccaaaatcgtttgcttgagcaccacagttacttttgagtaatatttttgtgagatacttttaaatttatttttttgaagtctggtgctctgaaattgaatttgaagtcagcttaataccaaagtgtgacacattctctttcagcaggctttactgtatctcacgtctatttagtttttacaaatttagttttcatgatttctgcatctttggaatacaaatcctgggatggtttctatctgaatggagtcttcagtgaatggtgacatggtttcctttattttttcctatttcttttttttttgagacagagtctcgctctgtcgcccaggctggagtgcagtggtgcgatcccggctcactacaagctccacctcccgggttcatgccattctcctgcctcagcctcccgagtagctgggactacaggcgcccgccaccacgcctggctaattttttttttttttttgtatttttagtagagatggggtttcaccgtgttagccaggatggtctcgatctcctgacctcgtgatctgccctccttggcctcccaaagtgctttatatcttctgtcttgattaattttcttcctctttggtaacacctgttgtctcttacggaccaaccctgtgctagggctgaggcacaaggagctctaagaaccaagctgtggccgggcacggtggctcaagcctgtaatcccagcactttgggaggccaaggctgtcggatcatgaggtcaggagattgagaccatcctggctaacacggtgaaaccccgtctctactaaaaatacaaaaattagccgggcatggtggtgggcgcctgtagtcccagctactctggaggctgagacaggagaatggtgcgaacccgggaggtggagcttgcagtgagccgagatcgcgccactgcactccagcctgggcgacagagcgagactcactctcmaaaaaaaaaaaaaaaaaaaaaaaaaaaggaaccaagttgtgagtgagaaggacctggaaaggcactgttagtggcagtggatccgtaggggtctgcaggaacctcaactcttgcgtcctcagaagaattcgacggaggaggcatgaggcagaaggagagacagaggcaagttttatagcagaagtgaaagtttatttaaaagctttagagagcaggaatgaaagaaaggaaagtacacttggaagagggccaagcaggtgacttgagagaccaagtgcgctgtttgaccttgacttacggtttagtatattggcatacttctggggtcttgtgtccctgatttcctgatttttccctggagggtgcgccgtctgtatgcgcagtggcctactagcgtttgggagaggccgtaggcgcagtgtgtttactggagttgtacgcrtgctccctagagtggttcttcccttcccggtctagcattcctaggggaaagtgatgtaccagttaagctctgctgttttgcctcttagtgctcatgcttgagcccactcgcccaattcctgaaatcttagggggaagcggctgatcaccagtttcagatttttcctatgtattgtgagactgcctttccctggcacaggctgcaactaattattattttagagacacagtaaacaaccacttgatcatcacctgatggtcagctggtgtgtgtatgggggggttgggagggccctctcctgccctgctcatgtgtgattagctacccagtttaacaggaccatgttattgcatcattaaaagtgaagtattatgccctatgtcaggagggtagaggtgcacagataaggtcagtggaccccagttaagggggcagggaatacttcctggaataaattacatttgagctgaaacttgaaggatgtatttaggtgatgtagacaagtggttggagcagagatctcatctgtacccacatactccaccttccctcttgctgcaattgattatctactcccatgtaagacaagcccttgacttatacactacctctcatcctctgatattttcaagtagctcattctgcagttggctcttcatcctgcagtggcaatttttactatttacatggtcttttgcataaacatgcaatattttctttctttgaaagcaaaacaaaactcccttaatccacattcacctccagtatatgtctcatttttctgttactctacagccaaattccttgaaattgttacttatattcacatctccatttctttgcattgcgtacttcctgaagctcattgcaattatagtttcatccttgccatttcactgaaatcactcttgtcaaggtcacccactgcctcccataatgccagagtggtcaatttttagtatccttactgtgcaaccagctctcatgattgtacccagtcaaatctctataataaattatacatctctctacagacctggactgaaacattgctatttggtgttttaccctatttagagccaaaatatattttcataagaagaaactcacagctgtcacatgtawgtaagttataaactgatttcagaatctccaatacagaaaatagtaactttagtgttcctattgtttggtactctaataataattagagaaaactgagagtttgggattatgtgactacaggaaatacctgtaattgccaattggcttcataataagaaaattggcagggctaagaaggcccagggaattaagaatataaatgtagaggttaacatggagaactacttagcatgaaagaatatggatgtttcatttaatttttttcatatcaaaaatctctcttcttgtaccaatttctgctcattggcttatagcaggtacagttcagggactctagcattgattagtataagttcctaattttcaggtgaaggcactgaggcccaggagagtgaagggcttgaggtcaaacacccatgaatggagaaggcttctggccccctccaatcccctctgcatctcactaacaggactggaagctgctgaaacagaggtattggaagcccacagatcatcaatatacagtttgaacttgtagtgaggtagacaagaataattcatagggatgtattatagagtaggtagagaaggctgactcctgacagtggcatatttgataaaaatccycccaaaggcatttagtacctggtaggctaatggctcatgagagaaaacacaagaaaggagatgatatgggagggtgggaaagccaatctttaggtaaaaaattacaagtcgtctttaaactatttactttaaaaattactagtttttctgctctgcatgctaatatgctactctttttttctcaactttattatttctctttgaatgtatattagtccattcttacattgctataaagaaatatcggagactaggtaatttataaagaaaagaggtttaattgcctcatggtttcatagrctgtttgggtagcatggctggggaggcctcaggaaacttttaatcatggtggaaagtgaaggggaagtagggacgtcttacatgaccagagcaggaggaagagagagaagggggagatggtgcacacttttttttttttaagctttgtatctaatttggcaatcttattccagtatttttctttttctttttttttttattatactttaagttctagggtacatatgcacaatgtgcaggtttgttacatatgtatacatgtgccatgttggtgtgctgcacctattacctcgtcatttacattaggtatatctcctaatgctttccctcccccctcccccaccccatgacaggccctggtgtgtgatgttccccttcctgtgtccaagtgttctcattgttcaattcccacctatgagtgagaacatgcggtgtttgtttttttttgtccttgtgatagttttctgagaatgatggtttccagcttcatccatgtccttacaaaggacatgaactcatccatttttatggctgcatagtattccatggtgtatatgtgccacattttcttaatccagtctatcattgatggacatttgggttggttccaagtcttcgctattgtgaatagtgccgcaataaacatacgtgtgcatgtgtctttatagcagcatgacttctaatcctttgggtatatacccagtaatgggatggctgggtcaaatgatatttctagttctagatccctgaggaatcgccacactgtcttctacaatggttgaactagtttacygtctcaccaacagtgtaaaagtgttcctatttctctacatcatctccagcacctgttgtttcctgactttttaatgatygccattctaactggtgtgagatggtatctsattgtggttttgatttgcatttctcggatggccagtgatgatgagcattttttcatgtgtctgttggctgcataaatgtcttcttttgagaagtgtctgttcatatccttcgyccactttttgatggggttgtttgtttttttcttgtaaatttgtttgagttctttgtagattttggatattagccctttgtcagataagtagattgcaaaaattttctcccattctgtaggttgtctgttcactctgatggtagtttcttttgccgtgcagaagccctttagtttaattagatctcatttgtcaattttggcttttgttgccattgcttttggtgttttagacatgaagtccttgaccatgcctrtgtcctgaatggtattgcctaggttttctcctagggtttttatggttttaggtctaacatgtaagtctttaatccatcttgaattaatttttgtgtaaggtataaggaagggatccagtttcagctttctacatatggctagccagttttcccagcaccatttgttaaatagggaattgtttccccatttcttgtttttgtcaggattgtcaaagatcagatggttgtagatgtgtggtattatttctgagggctctgttctgttccattggtgtatatctctgttttgktaccastacyatgctgttttggttactgtagccttgtagtatagtttgaagtcaggtagtgtgatgcctccagctttgttcttttggcttaggattgtcttggcaatgtgagctcttttcagattccatatgaactttaaagtagttttttccaattctgtgaagcaagtcattggtagyttgatggggatgtcattgaatctataaattaccttgggcagtaaggccattttcatgatattgattcttcctacccatgagcatggaattttcttccattcgtttgtatcctcttttatttcattgagcagtggtttgtagttcttgaagaggtccttcacatcccttgtaaattggattcctaggtattttattctctttgaagcaattgtgaatgggagttcactcatgatttggctctctgtttgtctgttattggtgtgtaagaatgcttgtgatttttgcacattgattttgtatcctgagactttgctgaagttgcttatcaactgaaggagattttgggctgagacaatggggttttctaaatatacaatcatgtcatctgcaaacagggacaatttgacttcctcttttcctaactgaataacctttatttctttctcctgcctgttattatgttgaataggagtggtgagggagggcatccctgtgttgtgccagttttcaaagggaatgctttgagtttttgtccattcagtatgatattggctgtgggtttgtcataratagctcttgtttttttgagatacaccccatcaatacctaatttattgaragtttttagcatgaagggctgttgaattttgtcaaagggcttttcttcatctattgagataatcatgtggtttttgtctttggttctgtttgtatgctggattacatttattgatttgcatatgttgaaccatcctcgcatcccaaggatgaagcccaggtgatcatggtggataagctttttgatgtgctgctggattaggtttgccagtattttattgaggatttttgcacaaatgttcatctgggatgttggtctaaaattctctttttttgttgtgtctctgccaggctttggtatcaggataatgctggcctcatgaaatgagttagggaggattctctctttttctattgattggaatagtttcagaaggaagggtaccagctcctccttgtacctctggtagaattcggctgtgaatccatctggtcctggacttcttttggttggtaggctattaattattgccttaatttcagagcctgttattgatctattcagggattcaacttcttcctggtttagttttgggagggtgtatgtgtccaggaatttttccatttcttctagattttctagtttatttacatagaagtgtttatagtattctctgatggtagtttgtatttctgygggattggtggtgatatcccctttatcattttttattgagtccatttgattcttctctcttttcttctttattattcttgctagctgtctatcaattttgttgatcttttcaaaaaaccagctgctggattcattgattttttgaagggttttttttgtatctgtatttccttcagttcttctctgatcttagttatttcttgccgtctgctagcttttgaatgtgtgttctcttgcttctctagttcttttaattgtgatgttasggtgtcaattttagatctttcctgctttctcttgtgggcatttagtgttataaatttccctctacactgctttaaatgtgtcccatttaaaggtgatttggggtggagagttctttagatgtctattaggtccacttggtgcagagctgagttcaactcctggatatccttgttaactttctgtctcgttgatctgtctaatgttgacagtggggtgttaaattctctcattattattgtgtgggagtctaagtctctttgtaggtctctaaggacttgctttatrtatctgggtgctcctgtattgggtgcatatatatttaagatagttagctcttcttgttgaattgatccctttaccattatgtaatgaccttctttgtctcttttgatctttattggtttaaagtctgttttatcagagactaggattgcaacccctgcctttttttgttttccatttgcttggttgatcttcctccatccctttattttgagtctatgtgtgtctctgcatgtgagctgggtctcctgaatacagcacactgatgggtcttgactctttatccaatttgccagtctgtgtcttataattggtacatttatcccatttacatttaaggttaatattgttatgtgtgaatttgattctgtcattatgatgttagctggctattttgcttgttagttaatgcagtttcttcctagcatcagtggtctttacaatttgtcatgtttttgcagtcgctggtaccagttgttcctttccatgtttagtgcttccttcaggagctcttttagggcaggcctggtggtgacaaaatctctcagcatttgcttctctgtaaagaattctgtttctccttcacttatgaagcttagtttggctggatatgaaattctggkttgaaaattcttttctttaagaatgttgaatattggccccactctcttctggcttctagagtttctgccaagagatctactgttagtctgaagggtttccctttgtgggcaacccgacctttctctctggctgcccttaacattttttccttcatttcaactttggtgaatctgacaattacgtttcttggagttgctcttctcaaggagtatctttgtggcgttctctgtatttcctgaatttgaatgttggcctgccttgctagkttggggaagttctcctggataataccctgcagagtgttttccaacttggttccattctccccatcactttcaggtacaccaatcagatgtagatttggtcttttcacatagtcccatatttcttgaaggctttgtttgtttctttttactcttttttctctagacttctcttctcacttcatttcattcatttgatcctcagtcactgatatcctttgttccagttgatcgaatcagctactgaagcttgtgcattcattacatagttctcatgccatgtttttcagctccatcacgtcatttaaggactcctctacattggttattctagttagccattcgtctaatcttttttcaaggtttttagctttttttgcaatgcgttctaacttcctcctttagcttggagaagtttgatcttytgaagccttcttctttcaactcgtcaaagtcattctccatccagctttgttccattgctggtgaggaactgtgttcctttggagagggagaggcgctctgatttttagaattttcagcgtttctgctctgttttttccccatctttgtggttttatctacctttggtctttgatgatggtgacgtacagatggggttttggtgtggatgtcctttctgtttcttagttttccttctaacagttagggtcctcagctgcaggtctgttggagtttactggaggtccactccagaccctgtttgcctggatatcagcagtggaggctgcagaacagtgaatattgctgaacagcaaatgttgctgcttgattgttcctytggaagcttcatctcagaggggtacctggctgtgtgaggtgtcagtctgcccctactggggagtgtctcccagttaggctactcagggttcagggacccacttgaggaggcagtctgtctgttctcagatctcaaactccattctgggagaaccactactctcttcaaagctgtcagacagggacatttaagtctgcagaggtttctgctgccttttgtttggctgtgccctgcccccagaggtggcatctacagaggcaggcaggcctccttgagctgcrgtgagctccacccagttcgagcttcctggctgctttgtttacctgctcaagcctcagcaatggtgggcgccccacccccagcctcactgyagccttgcagtttgatctcagactgctgtgctagcaatgaagggggctccgtgggcatgggaccctctgagccatgtgtgggatataatctcctggtgtgccgtttgctaagaccgttggaaaagggcaatattagtgagaggtgacagcatgctggcagccctcacagccctcgctygctctcagcacctcctctgcckgggctcccactttggcagcacttgaggagcccttcagcccaccgctgcactgtgggagcccctttctgggctggccaaggctggagccggctccctcagcttgcagggaggtgtggaaggagaggtgcgagcggcaaccagggctgcacagggtgcttacgggccagctggagttctgggtgggcatgggcttggtgggccctgccagagggccctctcagagtggccacctggccctgccagccctggggaatgaggagcttagcacccggaccagcggctgcgcagggtgtgctgggtcccccagcagtgccagcccaccagtgctgtgctcgatttctctccaggccttagctgccttcctgtggggcagggctcgggacctgcagcccgccatgcytgagtcccgcccccacccccacgggstcctgtgcagcctgagcctccccgacgagcgctgcccactgctccatggtgcccagtcccatcgaccacccaagggctgaggagtgtgggcgcacagcacaggactggcaggcagctccaccagcagccccagtgcgagatccactgggtgaggccagctgggctcctgtgtctagtgggaacttggaraacctttatgtctagctaagggattgtaaatacaccaatcagcactctgtctctagctcaaggtttgtaaacacaccaatcagcaccctgtgtctagctcaggttttgtgaatacaccaatcgacactctgtgtctagctactctggtggggacttggaaaacttttatgtctagctaagagattgtaaataacaccaatcgacactctgtatctagctactctggtggggacttggagaacctttgtgtccagctcagggattttaaacacaccaatcagcaccctgtcaaaacagaccactcggctctctgtaaaatggaccaatcagcaggatgtgggtggggccagataagagaataaaagcaggctgcccgagccagcagtggcaaccrgctggggtccccttccacactgtggaarctttgttctttcgctctttgaaataaatcttgctgctgctcaatctttgggtacacactgcctttatgagctgtaacactcactgtgaaggtctgcagcttcactcctgaagccagcaagaccatgaacccaccgggaggaatgaacaactccagacgcgccaccttaagacccgtaacactcaccgcaaaggtctgcagcttcactcctgagccaaagagaccacgaacccaccagaaggaagaaactctgaacacatccgaacatcagaaggaacagactccagacgatccaccttaagagctgtaacactcaccgtgaaggtccgcggcttcattcttgaagtcagtgagactaagaacccaccaattccggacacattagggtgtgagtgacccgattttccaggtgctgtctgtcacccttttccttggctaggaaagggaattccctgaccccttgtgcttcccgggtgaggcaatgcctcgccctgctttggctcacacttggtgtgctgcacccactgttctgcccccactgactgacgagccccagtgagatgaacccagcaccttagttggaaatgcagaaatcaycygtcttctgcgttgctcacactgggagctgtagactggagctgtttytatttggccatcttggaaccaccttcccaatagtacacatttttaaacaaccagatctcatgagaactcactcactatcatgagaacagcaagggggaaatcagcccccatgatctagtcacctcccaacaggtccctcctccaacattggggattataatttgacatgaaatattggtggggacacaaatccaaaccatattagaatatatgcacaggaaatggcctaaagatgtcatatgcccttggttttacttagagtttgaaaatcaggttatgaggtcacttatttcagacagtagttcacattatttaactatcctctgtcacttttagagtttttattttattaaaggctttaattggtaatactcatttctttttcttttattagcattgattttactttctgtagaaatacagaaagcattttcaaatgctaattttattatgtctgtatctggtagaagattcaaaacattgctccaaaaacacttggcagcaaattccccattcactggcaacctgaaatrtaagtttattgagcatgaatgataattcgttatcagatgtaagtcttggctctaattacaagatgcttgtagtccaacatgtagtctaacaccttatactctgatcaagtataagaaagaggccaatttactagtagaaattgcaacaatgaataggaaaaaaaatgtacgctgcaaagcagagcactgtgagagaagaatgtatggtatattcatagtggttgagggggagaggattaatagcttttggacatattacagaatgttaattacatgcaaaacaaaatagttctgtatagggaagtgtgaatgctgtacatagcatgtgactagcttgcatttaatggggaaaagaatttaactagataattagtatatatcaaatgcaatttatgtgtcagacatcatgctatttatgtattttacacaattattatcaaaatgtaatacattaccaatgactagaaataatagttgaagaataakaatagtttcataaaaagtgtaggataattgaatcagagagagacattcagagaagaaaaacgttatgaaaaattttaagtagtagtttgaaggaagaaaaaagagttttccaaaaagaaaatgtctggaaatataaagyaattcaaaatttgagaagcagaggttttgctttagtaaggagagggtaaatagatatggctggtagagtgtaractgtgaccagagcagcgattctcttggcttataagaggaaactgctgggtaatcccaaagggccttgaattgttgatgaaatgtaagttctttgtggagttaattttggtcaaacattgaccaaaatgtttataaatttccttttttcgtggtaaaataaaattgtcttatgattgcttcttgagtgaatttttaaggatattaaaagttggtattccttaaaagttaaccttttacggttaataaactattgctatagtttattatggtctttgattcatttttctactaggttacttgagactgctacacaacatcaaaaaaattctaatgcacatgggcacaggtttattgtttgaattcccataaaaatttaaaacatsactgaaatggcaaagttgatttaacattaaatgtaacatatcacattaaaaatagaagatactaaagaaaaaatatacaaatattgtagtagatggaggaaaacttctctatgcattratgataaaaattatcaggaagttcagagtagaaggaaaagttttcaacctgaaaaaccatttttactaaaagcctacagcaaacatcatgcttgaagattaaatagtagaaacactccttttaaaatgaaacatgacagacatgcatatgtttttattttttgcttttttctctctttttcttgctctcccagtcttcctcttttttcttttttagtattatattggaggtctcagaatgctcaggaagacaagaaaacaaaaatatattggaatatgagcggaagactttttttgtcattacttataattgataaaattaacttcacagaaagtcctctacaacatacaggaaaactatttgaattagtatgaaagcttagtgacagtattggatatacaaaatataaatctcaattgcaaatctatacacaaggatgaaagattaggaaatatattttaaaatatattatttacaagagcagtaaaatatattaaggtcctagtaataaatcaaataaagatgtgcaagacctcaaagaagaaaatccagaaaactttattcaacaatgttaaagaagagagacagatcatagggagacacaatagcataaaggtccaaattctttccaaattgatatatagtctaatgcaatttaataaaaatcccaaacactaatttttatgagattagacaagctgattctaatatatacatggaagaacaaacggccaagaatagccaacatatgcttaaagaaacaaaatcaaggggcttataataatgctgctataattaagartggatgattatgtagatcaatggaatagaacagaaagttcagaaattgacatgttaatttagggaaattaaatattttgaaaaggtagcattgaatattagtgagcaaataattcttttattaagtcacctggtacaatgattatttatatagaaaatttataattggatctctacttcacatcatatatgaaattcaattccaggcagatttaggatttagatgtgaaaaacaaaactttaaaatatttagagaataaatgtttaagaatattttacagggtaggggaaaatttcttaagcaatcacatgtagcataatgtcaaaatggaaaggctgataaattagatttaaacaatctaattttaaattagatttaaacagtctaattttaaattagatttaaacagtctaattttaaattagatttaaacagtctaattttaaattagatttaaacagactaattttaaattagatttaaacagtctaattttaaattagatttaaacagtctaattttaaattagatttaaacagtctaattttaaattagatttaaacagtctaattttaaattagatttaaaaaattaaggccttttcttcgttcaaagatactttaaattttgtaaaaaataagcatcaaattgaaagaaatttgcaatacttttaaccaacaaaggattaatgttcagaatgtatgcataactcctatgtttcatataggagttagaaaaaaacgaagagcatacggaggatatggcagaaattttaggttttttaaaaattagatgttgtttggactgtatatacatttttttgttcctttataaaaaagtaacagctttgagatataattcatataccatcatacatttcctttaaaatgtataatttaatggtttttagtatatttacaattatgtaactgatagactctttgtgttccttagctcagctaggtctgagttcttgtcaaatgaccaggaagaattaggcacgtggacaccagagagtgagtggagtarrattaattaagcgaaatgaaaactctcagtggagagtgtatgtggggaagggggtggttcccctacctgaaggtgggaaggccccccaacctgccgccccatgtggctgggtctggggtcttttatggactcagaatggagagtgcatgctgattggtttgtgagtatgcaaaaaaggttaaaacaaagacaccactcagacgtgggcatgagagtgtagaagaccaattaggaaagggtaggtatatgtaaaatagatgaagggtgaggatcaatcacagaaagcatgacaaacaggaaaacaagttctcaagtcagtctgaggatttaacttgcagcttggttttcaggctttaagctctttggctcggaggtggggtttcaccatggagccacccctatctgcctaggtatttggctgcctcctgctactctgatagccaccaccacaatacattttagaacatttttaacaccctaataaagaaacttgggactcattagcagtcaatcccaatctcctcctccctaacatctccagccctaggcaaccactattctacttttctctatagattttcctgtgctgaatatttcatataaatagcaccaaataatatgtggtttttgtgtctggttcctctcacttagcataatattttcaaggttcatccatgttacagtacatatcagtacttcatttctttttattgctgaataatattccattgtatggatataacacgtttcttttccattcatcacttgatatttaatggtttccactttttgtctgttaggaacagtgctgtaatatacattcatgtaccaagtttttatgtggacatatattaataatttcatttctgctgggtatgtaactaggagtagaattgctgcatcataaagtwattctatatttaatctgagggactgttagacctgttttccagagtgatgatacyattttatattcccacaagtgtccycatggatacttgttattatctgtttcttaaattatggccatcctagtagatgtgaagtggtatctcattgtgattttctttggcatttctctagtgtctaaggatgatgagaaagttttcatgagtttaatggccatttgaatattgtctttggtgaaatatacattggttttaaataaacattgcttcataataacacaactttaaagataaacagaatgaggagaaaatagaaaaaaagttaatgtagataaytctttagataagctttgctgtgaatagaagcagtgaaaggagataattcaaaggacatgtgagttgaagaaaggcttgcaaatgttccggttcagcaatttcttttatgccacagtgataatagtagcccacagtcacagtctcagtgggcacagagtgagggaggcaaagtgagggacagaaatggggaaggaagaggaacacaggagggaactgagtttattgcaaaatgcagaagaatggttgaataatagaagagtcaccttgtctggcagaagtgttgaaaatgggctcttgtaggggcagaagaaaagcactcaggccattggataggcagactttttcccttgagaatccatgactcttgtcaccctttgcttccctctctacccagggactttactgctttacaacctaaggaaccagctaaaacaacagcaacaacgataacaacaaacccaattctcacccgccgcacctgcccccaccacccgcaaaaarcaaatccaaacaaaaaactatttaaaaatcacacaattcacaaaaagcgtctcaagagtatgttaatgtaaataccatttgtattaaacccttaccttatttaaacgtacacatagrgcttgactttaagaaacccatgcatgaattatttgaataactgaactaatgaagggtgaaattaaaataaatatattcaaataatgagaggyggtataagtgaagggaaatatggtttaaattctgagtcttataaaaataatatgtatgtacatgtagtacaactattaaaatttgggctattcttgtttcttaatatttttgtgtataatgataaaaaacaataaaagaaataaagctatttgatttggatgtacagagaaaaatccaagctatgggaagtacattgtgacccccaggtgtatacatatgtacataagctggggttaagctattgccttaattttagccccacccatgtacactctgtgacgctgcctgggattctacaaatcacatttatcttttgccactaagctccctgttaggatctgccaatcagaggacgctaggggcggactggaaggctgagtggggaagaaggaagacacttcctgtttgcttcctgttctgtttaacgacaccctaasgattacttttcatttcagcagttatagtttgtttcagtagcaacagttatttccagttttagttttgacagcattcctagaactagctccttagggttttttaaagacaccaacgccaaccagcaagcgccccctactgagcggtctaggtcccagctctgagaagccactcaagtttctaagtttagtatttatattataattctaacctcttccctttgttgtctcagcactaggtagctgcttcctatgttgcttataccatgatattttagtattccctcttgccttctccatttttcaatatctggtcggatagcaattctttatattgaattatttctgtaaaaataactgttggggtttctattctatatcttagatggactctaactgaattaatacatatgtaaatatatggtgaatatatataaattataaacatatgtctctatatgtatatatagatatgtgtctctatatcaatgtatgtattatagatatatacatatatgtatatatagaaccatagataattctccttaatatgcatgtacatagatatgtacatccatattatatgatatagaatatataaatataatatctaatatatgcatattaaggagaattatctatggttctaaatatgcrttatacatatctatatgcatactgtatatcatataatacatatccatgtacatgcatattaaggagaactatttacggtttttggtctcatttgtaatgctcataaaaattttctcttttaattttaatttcattgaaaccatccttggactcatacttggagacaaacttacttggtcactatatattattattttgacacactttggtgttcagttagctaagttagaaatttagtttatgtgtttattagttaaaataaataattgactttccttgtactgtctttttctggttttgatgtcagtgttgtttagctttgaggaatgggctaggaaatgtttcatatattttgaaataatttgtataaattggaattatttgtttcttaaaggtttatggaacatctaaagaacaaattcatctggctctcatacagtttttaggatactactttgattgacatttcagtttcttttagatctatatcttctatttttcttgaggctattttgataattatttcttaagatattatcaattttcatctagataawaaaatatatcattttatgtatttttaaattcatcgatatttccacttttcattgacaacattattaagttttattgtgtctcttttttcaaattatacttgatgaaattttgaaaatgattggtctttccaaaaatcacctttaggttttattgataaactttttcttattttctaagtcaggatacaaaatcagtgtacaaaaatcacaagcattcttatacaccaataacagacaaacagagagccaaatcatgagtgaactcccattcacaattgcttcaaagagaataaaatacctaggaatccaacttacaagggaggtgaaggacctcttcaaggagaactacaaaccactgctcaaggaaataaaagaggatacaaacaaatggaagaacattccatgctcatgggtaggaagaatcaatatcgtgaaaatggccatactgcctaaggtaatttacagattcaatgccatccccatcaagctaccaatgactttcttcacagaattggaaaaaactactttaaagttcatatggaaccaaaaaagagcccgcatcaccaaggcaatcctaagccaaaagaacaaagctggaggcatcacactacctgacttcaaactatactacaaggctgtagtaaccaaaacagcatggtactggtaccaaaacagagatatagaccaatggaacagaacagagccctcagaaataaygccgcatatctacaactatctgatctttgacaaacctgagaaaaacaagcaatggggaaaggattccctatttaataaatggtgctgggaaaactggctagccatatgtagaaagctgaaactggatcccttccttacaccttatacaaaaatcaattcaagatggattaaagacttaaacgttagacctaaaaccataaaaaccctagaagaaaacctaggcatcaccattcaggacataggcatgggcaaggacttcatgtccaaaacaccaaaaggaatggcaacaaaagccaaaattgaccactgggatctaattaaaytaaagagctgcacagcaaaagaaactaccatcagagtgaacaggcaacctacaaaatgggagaaaattttcgcaacctactcatctgacaaagggctaatatccagaatctacaatgaactcaaacaaatttacaagaaaaaaamaaacaaccccatcaaaaagtgggcgaaggacatgaacagacacctatcaaaagaagacatttatgcagccaaaaaacacatgaaaaaatgctcatcatcactggccatccgagaaatgcaaatcaaaaccacaatcagataccatctcacaccagttagaatggcaatcattaaaaagtcaggaaacaacaggtgctggagaggatgtggagaaataggaacacttttacactgttggtgggactgtaaactagttcaaccattgtggaagtcagtgtggcgattcctcagggatctagaactagtttattaatttcttttaaaaaatcttcaataattctaccctaattttctgagcattttcttagccatctgaaagcttagttcaacaattttcaatgttttgttttttaatactaccttggcataacactgagggtatatccttattttctcattctcacactctcaatagttctatgtagtttgtaattttcattttgctgttcccttgwcctaaaagtaattttgaatgcgaagagcacttttcagtcacttaatttttaaaataaattttattgtgtacatttaaagtatacagcattatgttatggaatacacataggtagtaaaaatttattatggtgaagaaaattaacatatacataatctcatataggaagaaaaaactttgtgtgtggaaagagcagctaaaatctactgatttagcatgaattctatgtacagtacaattttattacctatagtcttcatcttgtgcattagatctctacatttgtttagcctatatatctgctactttggttttttttatttacttttaatttttgtgggtatacagtaagtgtatatatttatggggtacatgaggtgttttcatacaggcatgtaatatcaaataagcacatcgtggagaatgggatatccaccccctcaagcatttattcttggagttacaaacaatccatttctattctttcagttattttaaaatgtacaaataarttgttattgattatagtctccctgttrtgctatctactaattaatagtagttcttattcataccttctattwttttttgtgcccattaaacatccctacctcccccaccaccaacatcccactatccttcctggcttctggtaaccatccttctactctctctgtccatgagtttaatagttttaatttttagatcccacaataagtgagaacatgtgatgtttgtctttctgtgcctagttcatttcactccacatgatctccagttccatccatccaggttgttgcaaatgactggatctcattctttttataactgagtaggaattcattatgtatatataccacattttctttatccatttatctgttgataggcacttagattgcttccaaattttagctattttaaacagtgctgcaacacacttaggagtgcagatatttcttggatataatgatttcctttcttttgggtgtatacccagcagtgggattgctggatcatatggtagctcaatttttagttttttgaggagcctccaaactgttttccctagttattttgccaatttacattcccaccagcagtgtacaagggttcccttttctctacatccgtaccagcatttgttatttgcctgtcttttggatataagccattttaactggggtgagatgatatctcattgtagttttgagttgcatttctttgatgatcagtgatgttgagtacattttcatatccctatttgccatttgtatgtcttttcagaaatgtctattcaaatcttttgtccatttttaatcaggttattagtttttttatagacgtgcttgaactccttatatattctggttattaatcccttgtcagatgagtagtttgcaaatatcttatttcactctgtggattgtctcttcacttagttgattgtatcctctgttgtacagaagctttttaacttgatgtgatctcatttgtccatttttgtttggttgccttgcttgtggcatattgttcaagatgtttttttttgcccagaccaacatcctgaagatttttccccaaagttttcttgtagtagttttatagtttgaggtattagatttaagtttttaatgtgttttgatttgatttttgtatatgatgaaagatagaggtctattttcattcttctgcatatgaatatcccgtttccccagaaccatttactgaagagtctctcttttccccagtgtatattctttgcacctttgttgaaaatgagcatacctgtgtggatttgtttctgggtcctctatactgttccattggtctgtccattgtcctgtgtatgtcttgaaaagttgtagtagttattatttttgattggttcattatttcatctttctacttaaaataagagaaatttacacactacagtttcagtgtatagtattctgtgtttttctaggtacttactatttctaatgagttttgtacttttagataatttctgattgctcattaacatgcttttctttctgattgaagtactccctttataagtactccttttacaagtactccctttacaagcatttcttgtaggacaggtctgctgttgatgaaatccttcagcttttgtttgtctgtgaaaatcattatttctccttaatgtttgaagggtattttttgccaaatatactgttctagcataaaggttattttccttcagcactttaagtacatcataccactctctcctggcctgtaaggtttccactgaaaagtctgctgctaggcatattggctctccattgtatgttatttgtttcatttttcttgctgcttttaggatccctgctttatccttgatctctggcagattgattattaaatacttgccattttgagtctattttctagatcctgtaggtgtgcttcattgttttttattatttttatttttttttctcttgyctcctctgtgtatcaaatagcttgtcttcaggctcacacgttctttcttttggttgattaattttgctattaaagkactctgctgtatttttcattatgccaattgcatttttcagcttcagaatttctgcttgattctttttaattatttcaatctctgttaaatttatctgataagattctgaattccttctctgtgttatcttgagtttctttgagtttccataacacagcggttttgaattccttgtctgaaatttcacatatctctgtttctctaggatgggtccctgctgccttatttagttcatttggtgagttcatgttttcctggatagtgttgatgctagcagatgttgttcaatgtctgggcgttgaagagttagatatttattgtagtcttcactgtctaggcttatttgtagccatcctttttgaaaggacttgggtgttgtgatctaagctatatctgctttagcagcaccccaagcccagtaatgctgtggttcttgcagacttgtaaaggatcaccttgatggacttagacaagatccaggagaattttctggattactaggtagagactcttgtyctcttcccttactttctcccaaacaaacagaatctctttctgttctgagtcacctaaagctgggggtggagtgacacaaacacccctgtgaccacctccagtatgactgtgctgagtcagaactgaagccagcacagcactgggtctgcggtaaccactccctggctaatgcctatgttcatataaggccctgaggctctacaatcagctgattgcaaagccaatcaggtctgtattcttcccttcagggcagtaaggttccctaggcccaggtggatccagaagtgctatctaggagttagggactagagttaaacacctagcagtctatctggtgttctattgtactgtggaggaactggcactctaaccacaagatgcagttattctcactcttccctcctctttccaaaggcagaggaacctcaccctgtagccactgccaccccaggccataaggaatactgtcagactgactacctccaatgtttctttaagatccaagagctcttaagtcagcttgtggtgaatgtttcctggcctgggactcatccttcagagcagtggactccactctggcccaggacagagccagaaattttatgcaatagtcaaatcctggaactggggagcccaagagcttgcttggtgctctacccaccctatggctgtgctgatacctgaagccagcaagtctcagaggcttacccaatgcccttgatgtggtacctgagtatcgcttctggtttttcagggacgaaaagctcttcagttagcagaagatgaatgctgccaggattggatcctttctctcaaggttatgggttcttttatgacccaaggtgtgtctaaaatgttcatgtgggaggtagggcccagaacaggggccttttgactctgaccactgccctatcctgctatggctgagctggtatccaagatccaakacaaagtcctcccaacttttccctctcctcttctgaagtggaagaaagggatttcttttcgagctgtgagctgtgaagcctgggggtaggggaggggtgatgccggcactcctttatccacctcagctggtgtctcagtatgtcatgtgccccccccccccccccccagtccactgtttcaggacctggttcagcactgggactcacctaattgttgcagaccttatggactacattggctttcaagtttgtttggagacacagagcactttggtcactggtagtgaggtttgcaggaactcaagttctgacctctgggatccatgatccctctctgagtagtgccggtttaaatgcttccctcgtgggcaggtgtcagctgagtytggtccggtttccctttctgctccacctggatagcacaaaatttaatgtctcacagttgctatgttctctctcctctagcacccagagatgctctctgcaccatgccatgacttccagggggtggagaacaggtaatgtcaggggttcagggctcttttttctatctcttcagttgcctctttcagtgatatgaagttaaaaccaggtactatgagtgctcatctgatttttggttcttatgaagctgtttttttttttttttttttctgtgtagatagttgttaaattggtatctttgtggagaaggcaatcagtggagccttctgtkcggccatcttgctccttatacctgctactttgtattctctgatctatgtctcttcatttctccactcctctgttccaaccacccctggtaaccatgtttgtcttctctatttctgtatatttatttacttattttagaatctacttataaatgagatcatgcagtatttttctttctgtgtctggtttatttcacttgtcataatgtcctccaccctctttcatgttgtggcaaatggcaagatctcattcttttttaaggctgaagaatatcccattgtatatatgtactacagtttctttatccattcatccatcaatggccacttaggttaggttgtttccatatcttggctattgtagaaaatactgcaatgaatatggaagtgggttatctttatgaggtgttgatttcatttcctttgggtatgcccagaagmgatattactgggacatgtgggagttctatttttaacttctttagaaaccaccatactcttttctataatggccacaccaatgtacattcccactaacagtgtatacaagttcccttttcttcatactcttactgacatttgttatcttcagttacttaatttttattggtgggaagggggctttattaacatttttttgttgagattattcatttctaattttttgcactattattggtgcttgctacaatttctagtttttgtttcataatttcaacttttagattcagggaatacatgtacttgtcacttgggtatattgtgtgatggtgagctttggggtatgatggattttgtcacccaggtactgagcatactactcactagttagtttttaagcctttgttcccctctctacctccacacttggtagtcccaagtgtctatttttgccatctttgtgtcattgagtacccattgtttaacttccacttataagtgagaatatgtgatatttggttttctgtttctaggttaatttacttaggataatggactcgggctgcattcatgtagctgcaaagaacatgattttgttatttttaatgtctacatagcatttcatggcatatatgtaccacattttctttgtctaatccaccgttggtgggcacctaggttgattccacttctttgctattgtgaatagtgctgcaatgaacatatgactacatgtgtcttttgggtagaataatttattttcttttggatatatacccagtaatgggaatgttgggttgactggtagttctgttttaagttctttgagaaatctccaaactgctttccayggtgggtgaactaatttacattcctaccaacagggtataacattcccttttctcaacagcctcaccagcctttgttgtttttgacttttcaataatggtcataatgactggtgtgagatggtatctcattgtggttttgatttcatttatttgatgattattgatggtgagcatatttttatgtttgttggctgcttgtatgtcttcttttgaaaagtacctgttcatgtcgtttgcccatgtttaatggggttatttgtattttgcttgttcaattgtttaagttccttatagattctggacattagatcattgtcagattcatagtttgctaatattttctcccattcattaggttgtctgtttacttcgttgataatttcttttgttgtgcagaagctcccaggtttaattgggtcccacttgtcaatttttgtttttgttgcaattgtttttgagcacttagtcataaattctttcccaaggctgatatccactatggtgtttctcagattttcttctaggattcttatagtttgaagtttttcatttaaatctttaatttgtcttgagttaatttttgcaaatggtgaaagatgggggttcagttttattcttctgcatatggctagccagctgttctaacaccatttgttgaataaggagtcctttccccattgcttctttttgttgaccttgtcaaagatcagatagctgtatacatgtagctttatttccgggttctttattctgttccattggtctatgtgtctgtttttgtatcagtaccatactgtttgggttactgtagctgtatagtatagtttgaagtcaggtaatgtgatgcctccagctttgttctttctgcttaggattggtttggctattcaggctcttttttaagttctgtatgaattttagaatagttttttttctagttctgtgaaaaatgacattggtagcttgaaaggaataccattgaatctacagtttgggcagtattgccatttgaatgacagtgattcttctaatacataagcatgaaatgttttttcatttgtttgtgtcatccatgatttctttcagcagtgttttgtagttctctttgtagagatcttttacctccttggttagaggtattcgtaggtatttcatggtttttgcagcagttgtaaaygggattgctttcttggttttgctctcagtttgagtgttattagtatgtggaaatgaaactgatttttgtacattgattttgtatcctgaaactttattgaaattgtttattttatatatatatatattattatactttaagttctagggtacatgtgcacaacgtgcaggtttgttacatatgtatacatgtgccatgttggtgtgctgcacccattaacttgtcatttatwttaggtatatcccctaatgctgtccctccccacttccccaccccacaacaggctccagtgtgtgatgttccccttcctgtgtccaagtgttctcattgttcaattcccacctawgagtgagaatatgcggtgtttggttttttatccttgcgatagtttgctgagaatgatggtttccagcttcgtccaagtccctacaaaggacatgaactcatcatttttcacggctgcatagtattccatagtgtatatgtgccacgttttcttaatccagtctatcattgatggacatttgggttggttccaagtctttgctattgtgaatagtgccacaataaacatacatgtgcatgtgtctttgtagcagcatgacttctaatcctttgggtatatacccagtaatgggattgctgggtcaaatggtatttctagttctagatccctgaggaatcaccacactgtcttccacaatggttgaactagtttacagtcccaccaacaatgtaaaagtgttcctatttctccacatcctctccagcacctgttgtttcctgactttttaatgatcgccattctaactggtgtgagatggtatctcattgtggttttgatttgcatttctcrgatggccagtgatgatgagcattttttcatgtgtctgttggctgcataaaggtcttcttttgagaagtatctgttcatatcctttgcccacttgttgatagggctgtttttttcttgtaaatttgtttgagttctttgcagattctggatattagctctttgtcagatgagtagattgcaaaaattttctcccattctgtaggttgtctgttcactctgatggtagtttcttttgctgtgcagaagctctttagtttaattagatcccatttgtcaattttggcttttgttaccattgcttttggtattttagacatgaagtccttgcccgtgcctatgtcctgaatggtactacctggttttcttctagggtttttatggttttagttctaatatgtaagtctttaatccatcttgaattaatttttgtataagatgtaaggaagggatccagtttcagctttctacatatggctagccagttttctcagcaccatttgttaaatagggaattgtttccccatttcttgtttttgtcaggattgtcaaagatcagatggttgtagatgtgtggtattatttctgagggctctgttctgttccattggtctatatctctgttttgttaccactacctgctgttttggttactgtagccttgtagtatagtttgaagtcagataacatgatgtctccagctttgttctttttgtttaggattgtcttggcaatgtgrgcccttttttggttccatatgaacttgaaagtagttttttacaattctgtgaagcaagtcattggtagcttgatagggatggcactgaatctataaattaccttgggcagtatggccattttcatgatatcgattcttcctatccatgagcatggaatgttcttccatttgtttgtatcctcttttatttcattgagcagtggtttgtagttctccttgaagaggtccttcacatctcttataagttggattcctaggtattttattctctttgaagcaattgtgaatgggagttcactcatgatttggctctctgtttgtstgttattggtgtataggaatgcttgtgatttttgtacatttattttatgtcctgagactttgctgaagttgcttatcagcttagggagattttgggctgagacgatggggttttctaaatatacaatcatgtcatctgcaarcagggacaatttgacttcctcatttcctaattgaataccctttatttctttctcctgcctgattgtctctgaagatagaccaatagcaggctctgaaattgaggtaataattaatagcttacctaccaaaaawagtccaggaccagatggattcacagccaaattctaccagaggtacaaggaggagctggtaccattccttctgaaactcttccaatcaatagaaaaagagggaatcctccctaactcatttcatgaggccagtgtcatcctgataccaaagactggcagagacacaacaaaaaaagagaattttagaccaatatccctgatgaacatmggtgcaaaaatcctcagtaaaatactggcaaaccgaatccagcagcacatcaaaaagcttatccaccgtgatcaagtgtgtttcatccctgggatgcaaggctggttcaacatacacaaatcaataaatgtaatccagcatataaacagaactaaagacaaaaaccacatgattatctcaatagatgcagaaaacacctttgagaaaattcaacagcycttcatgctaaaaactctcaataaattaggtattgatgggacatatctcaaaataataagagctatttgtgataaacccacagccaatattatactgaattggcaaaaactggaagcattccctttgaaaactggcacaagacagggatgccctttctcaccactcctattcaacatagtgttggaagttctggccagggcagtcaggcaaycagaaattggttatttgttccagtagtcttttggaggagtctttatggcttactcagtatagatcatatcatcagcaaagagagataatttgatttttttacctatgtggatgccttttatttctttctcttgcctgattcctctgggaaggacttgcagtactctattgaataggagtggtgagagttggcaaccttggcttgttccagttcttaaagagaatgctccccgtttttgcctgttcactacaatgttggctgtgggtttgtcatagatgtctcttattgttttgatatatgttccttcagtgcctagttttttgagaacttttaccaagaagggatgttggactatattgaaagttttttgcatctattgagatgataatattgttkttgttcttaattctgtatatgtggtgaatcacatttgttgatttgcatatgttgaaccaaatttgtawcccaagamttaagcctacttggtcacggtgaatgaactttttgatgtgctgctggattcaatttgttagtattttgttgaggatttttgtatctatgttcgtcatggatattggcctgtaattttctttttaagttgcgtctttgccaggtttggttattagagtaggctgacttcatagaataagttaaggaagagtccctcctcctcaatttttagaaatagtttcagtaggattggtaacagctcttctttgtgcatctggtagaatttggctggtgtgtatccatctggtctggggcaccttttttttttggtatctttttttttgttgctgattcaattttggaacttgatatttgtctcttcagggattcaatattttcctgattcagtcttgggagattatgtatttccaacgatttatccatttcctccagattagctagttcatgtgcatagaggtgttcataatagtcattgaggatcatttatatttttgtgggatttgttgcaatgtcacctttgttatttctgattgtgcttatttggatcttctctcttctgtttgttaaccttgttagtggtctattgatctcttctgtcctttcaaagaaacaacttttggttgcactgattgtataaattttgaggtctcaattttgttcagttctgccctcattgatttcttttatttttctagctttggggttagttttttgtatttctagtgtgatgttagattattaaattgagatatttctaccttcttgatgtaggagttcagcactatacactttcctcttaacactacttttgcagcatcccagagatttttggtatgtcgtctctctgtttttattcctttcaaataayttttttttgatttctacctttattttgttgtttaccccaaactcattcaggataagctgtttaaatcccatgtaatggggttttgagagatctgttggtattaatttctatttttattccactgtggtccaaaaatatggctagtatgatttcagtttttttgaatttagagacttgctttatggctaagcatgtgattgatcatggagtatattctgtgtgcagacaagaagactgtatattctgtcattgttgggtagagtattctgtagatgtgtattaggtccaaatggtcaagtgttgaatttaagtccagaatttctttgctagttttctgccttgatgatctgtgtaaggggatcagtggggtgttgaagtcccctgctattcttgtgaggctgtgtaaatcttttctaggtcaaaaagtacttgttttatgagtctgggtgctcccatgttgggtgcatacatatttagcatagttaagtctttttgttgaattgaaccctttatcattatgtaatgtccttctttgtccytttttactgytgttgatttaaagtctgtttttttctatgagaatagcaaccttagctcttttttgtgttccatttgcatgatagatcttttccaaccctttactttgagcctatgggtgtcattacatgtgagattggtctcttgaagacaacagtcaaatgggtcttgtatctttgtacaaattgccactctgtgccttttaagtgaggaaatttagaccatttacattcaagattgactattgatatgtgaggctttgatcctctcatggagttgttaggtggtggtttgtagtttctattgtttggttgctttatatggtctgtgggctatgtacttaagtggtttttttttggtggagcaagtatatttctttcatttctatgtttaaatcttccttgaggatctcttataagggtggtctagtgttaataaatccccttagtgcttggttgtctgaaaaatattttattttttctttgcttatgaattttagtttggcaggatatgaaatcttggttggaatttcktttctttaacaatgctggaaataggcccccaatctgttctggcttataaggtttctgctgagaagtccagtgttagactgacggggttccctttgtgagtgttctgacctttttctctagctgtctttaagatttttgctttagcattgaccttagacagtctggtgacaatctgcctgggtgatgttcatttagtatattatgtcacaggcattctctgtatttcytttgcttggatgtctacctgtctaggaagattagataacttttcttgaattattccctcaaatgttttctagattgttttctttgtctctctttctctcaggagtgccaataattcataggtttggtcacttcatataatcccatatttcttgaagaccgtttatttttaaaattcttttttctttacttttgtctgactgggttagtttgaaagattgatccttaagctctaaaattctttcttctgcttggtccagagagatggagtcttgctttgttgcccagactggtcttgaactcctggcttcaagtgatcctcctgcttcagcctcccaaagtgctggaattacaggtgtaattcagtgtgtctggcctttggcttacacttttattataatttgtcctgtctaaggtttctttttcatattgttatttttggttttcctctgtgctttcatgttaaggatgtcacttataaacaatgcatagcaagcttcttttttttaacctaatctgtgaattgctatattttaatagatagcttagccctggcatatgtattatagctaataatgaatttaacttttttctgtgattttattttgttttctttttacttcacttgctatatatttctctttacctcctttccagccttttgttagaatgatattttttctctttttttctcattctaatggtttggaagataatgctattctgagtaattattagtaaatttctatcatacaaacttatgtttgttcatctcattttttttgccaaagttcagttattcagtatcctgaccttccccattatttacataggtatctctgcactttctcattttcatataatttgaaatttgagtttgatagctactatgattttattgttctagcctgtcaatatgcttagacaattttaagtagccttcttttcttatcattacctttttaactccactttttctttttgtattttatttttgttttgctttttttttgttgctcttctcattcctctattcattgcatcctctaataattcttttcagacagcatttccaagtggtaaatgatgtcagtctttttctttctttctgtaatttctatatatttgaaatcctgtatttatctaactcttygtatttaccaggttagataaaactaatctggttaatttttatttctatagtaaaatttttttattataccttaagttctagggtacatgtgcacaaggtgcaggtttgatacataggtrtacatgtgccatgttgctttgcagcacccatcactcatcatttacattaggtatttctcctagtgctatmcctccccagcccccagccccccaacaggcctcactatgtgatgttccctgctctatatccaagtgatctcattgttcaattcccacctatgggtgagaacatgwggtgcttggttttcatccttgtgacagtttgctcagaatgatggtttccagcrtcatccatgtccctgaaaaggacgtgaactcatccttttttatggctgcatagtattccatggtgtatatatgccacattttcttaatccagtctatcattgatggacatttgggttggttacaagtctttggtattgtgaatagtgctgcaataaacatacatgtacatgtgtctttatagtagcatgacttctaatcctttgggtatatacccagtaatgggatggctgggtcaaatggtaattctagttctagatccttgaggaatcgccacactgtcttccacaatggttgagctaatttacattcccacaaacagtatgaaagcattcctatttctccacatcctctccagcgtctgttgtttcctgactttttaatgatcgccattctaactggtgtgagatggtatctcattgtggttttgatttacatttctttgatgacaagtgacgatgggcattttttcatgtgtctgttggctgcatagatgtcttcttttgagaagtgtctgttcatatcctttgctcactttttgatgggcttgtttttttcttataaatttgtttaagttctttgtagattctggatattagccctttgtcagatgggtagattgcaaaaattttttcccattatgtaggttgccggttcactctgatggtagtttyttttgccatgcagaagctctttagtttaattagatcccatttgcctactttggcttttgttgccattgcttttggtattttagtcatgaagtccttgcctatgcctatgtcctgtatggtattacctaggttttcttctagggtatttatagttttaggcctaacattcaagtctttaatccatcttgaattaatttttgtataaggtataaggaagggatccagtttcagctttctacatatggctagccagtttttccagcacgatgtattaaatagggaatcatttcccyatttcttgtttttgtcaggtttgtcaaagatcagatggttgtagatgtgtggtattatttctgaggcttctattctgttccatttgtctatatctctgttttggtaccagtaccctgctgttttggttactgtagccttgtagtatagtttgaagtcaggtagtgtgatgcctccagctttgttctttttgcttaggattgattgacttggcaatgtgagctcttatttggttccatgtgaactttaagtagttttttccaattctgtgaagcaagtcattggtagcttgatggggatggcattgaatctataaattactttgggcagtatggccattttcacgatatttattcttcctatccatgagcatggaatattcttacatttgtttgtgtcctcttttatttcgttgagcaggggtttatagttctccttgaagaggtccttcacatctctcgtaagttggattcctaggtattttattttctttgtagcaattgtgaatgggagttcactcatgatttggctctctgtctattattggtgtataagaatgcttgtgatttttacacattgattttgtatcctgagagtttgctgaagttacttgtcagcttaaggagattttgggctgagatgatggggttttctaaatatacaatcatgtcatctgcaaacagggacaatttgacttcctcatttcctaattgaataccctttatttctttctcttgcctgattgccttggctggaacttccaacactatgttgaataggagtggtgagagggggcatccttgtcttgtgccggttttcaaagggaatgcttccagtttttgtccattcggtatgatattggttgtgggtttgtcatagatagctcttattattttgagatacmttccctcaatacctagtttattgagagtttttagcatgaagagctgtcgaattttgttgaaggccttttctgcatctattgagacaatcatgtggtttttgtcatttgttctgttaatgcaatggattatgtttattgatttgtgtatgttgaaccagtcttgcatcccagggaggaatctgacttggtcatggtggataagatttttgatgtgctgctggatttgttttgccagtattttattgaggatttttgcaccaatgttcatcagagatattggtctaaaattctcttttttttgttgtttctctgacaggctttggtatcagtttgatgttggcctcataaaatgagttagggaggattctctctttttctattgattggaatagtttcagaaggaatagtaccagctcctctttgtacctctggtagaattcagctgtgaatccatctggtcctggagtttttttggttggtagcctattaattattacctcaatttcagagcctgttattgatctattcagagattcaacttcttcctggtttagtcttgggagggtgtaggtgtccagaaatgtatccatttcttctagattttctagtttayttgtgtagaggtgtttataatgttctctgatggtagtttgtatttttgtggaatcgatggtgatatcccctttatcrttttttattgtgtctatttgactcttccctgttttcttctttattagtcttgctagctataattttgttgatcttttcaaaaaaccagctcctggattcattgattttttgaagggtttttttaatgtatctatctctttcagttctgctctsttcttagttatttcttgccttctgctagcttttgaatgtgtttgctctggcttctctagttcttttaattgtgatgttagggtgtcgattttaaatctttcctgttttctcttgtgggcatttagtggtataaatttccctgtacacactgctttaaatgtgtcccagagattctggtatgttgtgtccttgttctcattggtttcaaagaacatctttatttcttccttcatttcgttatttacccagcagttatttaggagcaagttgctcactttccatctagttgtgtggttttgagtgagtttcttaatcctgagttctaatttgattgcactgtggtctraaagacagtttgttgtgattgctgttcttttacatttkctgaggagtgctttacttccaactatgtggtcaattttaraataagtgtgatgtggtgctgagaagaatgtatattccgttgatttggggtggagagttctgtagatgtctattaggtctgcttgttgcagagctgagttcaggtcctggatatccttattaaccttctgtcttgttgatctgtctaatattgacagtggggtgttaaagtstcccattattattgtgtgggagtctaagtctctttgtaggtctctaaggacttgctttatgaatctgggtgctcctgtattgcatgcatatatattaggatagttagctcttcttgttgaattgatccctttaccattatgtaatggccttctttgtctcttttgatctttgttggtttaaagtctgttttatcagagactaggattgcaacccctgcttttttttgctttccatttgcttggtagatcttcctccatccctttattttgagcctatgtgtgtctctgcatgtgagatgggtctcctgaatacagcacactgatagatgttgactctttattcaatttgccagtctgtgtcttttaattggtacatttagcccatctacatttaaggttaatattgttatgtgtgaattcatcctgtcattatgatgttcgctggttatttcgcccattaattgatgcagtttcttcatgccatcaatggtctttacaatttggcctgtttttgcagtsgctggtaccagttgtttctttccctgtttagtgcttccttcaggagctcttgtaaggcaggcctggttgtgacaaaactctcagcatttgcttgtctgtaaaggattttatttctccttcacttatgaagcttagtttggctggatacaaaattctggtttgaaaattcttttctttaagaatgttgaatattggccccccactctcttctggcttgtaaggtttctgccgagatatctgctgttagtctgatgggcttccctttgtgggtaacctgatctttctctctggctgcccttaamattttttccttcatttcaaccttggtgaatctgacaattatgtgtcttggggttgctcttctcgaggagtatctttgtcgtgttttctgtatttcctgaatttgaatgttggcctgccttgctaggttggggaagttctcctggataatatcctgaagagtattttccaacttggctccattctccccatcactttcaggtacaccaatcaaatgtagatttggtcttttcacatagtcccacatttcttggaggctttgttcttctctttttactcttttttctctaaccttgtcttctcactttatgtcattaatttgatctttaatcactgatacactttcttccacttgatcgaagcagctgttgaagcttgtgcatgcatcatgaagttcttgtgccgtggttttcagctccatcaggtcatttaaggtcttctcttcactctttattgtagttagctattcatctaatctttcttcaaggtttttagcttccttgcaatgggtttgaacatcctcctttagctcrgagaagtttattaccaaccttctgaaacctacttctgtcaactygtcaaagtcattccccatccagctttgttctgttgctgacgaggagctgtgatcctttgaaggagaagagtcgctctgatttttagaattttcagcttttctgctctggtttctccccatctctgtgtttttatctgcctttggtctttgatgttggtgacctatagatggggtttttgtgtagatgactttttgttgatgttgctgctattcctttatgtttgttagttttccttctaacagtcaggtccctcagctgcaggtctgttggattttgctggacatccactccagaccctatttgcctgggtatcaccagcagaggctgcagaatagcaaatattgttacctgatccttcctctggatgctttgtccaagaggggcagccacctatatgaggtgcctgtyggcccctactgggaggtgtcacccagttagtcagggacccacttgaggaggcagtctgtccattctcagagctcaaccaccatgctgggagaaccactgctgtcttcagagctgtcagwcagggatgtttaagtctgtagaagttgtctgctttcttttgttcagctatgccctacccacagaggtggagactagaggcagtaggccttgttgagctgcagtgggctctgcccagttcaagcttccaggccactttgtttacctactgaagcctcagcaatggcggacacccctcacccagccaggctgtcgyctcacaggttgatctcagactgctgcactagcagggagcaaggctccatgagcatgggagctgccaagctaggcataggagagaatctccttgtctgctggttgctaagaccttaggaaaagcagggtatttgggcggaagtgtcctgtttttccaggtagtctgtctcggcttcccttggctaggaaggggaaatcccctgaccccttgtgcttcccaggtgaggtgacgcccttccctgcttcagcttgccctccatgggctgcacccactgttcaaccagtcccaatgagacgaaccaggtacctcagttggaagtccagaaatcacccattttctgcgtcgatcacacttggagtttcagaccagagctgttcctatgtggccatcttggaatgcccctatatagtcaaaattttaatctcttccatcttatgttgattttatttaaggatgaaattttaaaatatgttttggagaatattatttataattataaaaagtcttgtcctgctcactgtaaattttcttgctttgcatataaatttcttctctttgttgagtcacatattgtttcttcatggtattggctttctctaaatattttatgattcttgcatatcttctgaaattccctattaaactcagaaaagggtgtatctgtttttgcattctgcttggtgggagaaagaggaccaatttttgaacatgaaaataagtagataagaatctgtgccctgggctcaccatttctactgggtgttgacagttgcctgaagcacaactttgtctctctgacccagtgttttgccactctcctccacctgaagaagatttttttttttctattgcttggctcttgggcaggttgaggagagaagagaggagatgaaggatgtgtaggttgctcctgctgtaaagatcygccctattttgcctggcccctgtcctatttctagtttctgctaccttcagacatgaggttactggtgcttctcctgtcttttgtagtttcgactctcttaagtgcatttgggctgtggttcccatctccaattcaatcttctgctttctgccttttaaagtcctgacagtatctcctttttttttgttttctgttgttgagatagatttatttattaggttggtgcaaaagtaattgtggttttggcaattttaatggaaaaaaaaaaacacaattacttttgcaccgacattttttttcttcttttagcttgtaaaggaatttgtaccagaagtggaggctgccctgaatgctcagtccatcatcttgaactggaaccacccttcacttcttaagataattttcatcatgcaaaaagagtgaaattcagtagtctcttcaacatcctatatgtattcttttggttttggctgtgtttttgttttttaaccataactcataaagcataagaatggctaccagaattaatgttaagcagttagcagctacttagggctatagtttttagttatgtttttacagtatatatttccatcctatgttctcttactctagaaaatgtaagataaatctagggctatccctgtataattttagcctcatagaatcttgaaatgaagaataggtgttgaccagttttttagaaacagggtagggggtcttgttctttcatcraggctggagtgcagtggtctaatcatagctcactacagccttgacctcctgggctcaagccatcttcccaccttccaagtagttgggattagagtcatgagccaccatgcttggctccagttttcttatttgtttgccaagtggattgtcttcttttctgttattcaaacaaataaatatgcaaaacagcaaaaaaagttttgcagacacggtggaaatatccaaggagtttttttaaagtatggggttcaatttgaattttactaccttctgaatataccttaattaatattgaaattgatcaatggattggagacatttgttaatgatcacaaaataattttgctgattaggatcaaacacagagtctccatgtaatgatttggaagggtgtttaatgaaagctgcaatattgcctacattgttttcatggactttgctggaagcatctttgaaacttaatggcaacttattattatattcaatggtctaataagacaaattcagaaaaaaattttgggctgatcccctgaagtttcaacatttaaatagtctaggaagtattggtgggtgtgtgattttattcccagatccttaataggctgttaagtaggtggctccacacacacccactttacatttttcttgtcacatgtgattcatttttattccacatttaaaaatccttccgagaaaaatattagataattttcatttcaaagtctaatagtccctgtggctgacattatttccaaggtctcatctcaatattatatgctacaggataaatttattacttttgttctttccttagtggacgtaataataattactactactttttgggcattacttctctgcttgtgatacggctctggcgagtagaggaacactagggctcttgtctcatgttcaattagataaaacaacatggacacacttggagtggttttaaggagcagagggtttaataggcaagaaaaaaggaagaagaaagaaggaagaagctcccctatacagagacagaggaaggggggctccaaagccaagagagggaaccccaagtgaagcagaaaccagccatgtgtatacagaggctggaggaggtggtgtctgatttgcacagggctcgggggattggtttgaccaggcatgtgattcacatagcctgggaaaaagctggccttcccaccctagccttttaatatgcaaatgcagggaaccatgatgttctacagaaattctctacagttctctacacacttggagatatgtgggggtggccatgttgccaggcacatgtggggcaagggcaagaaggcaactcctacaacacttgtaaatatacacgtaaatataataatgcacatgaaaattgttactaaactgtaaagtactattcaaaaatattaacattatttatggtagtattattagcataatatcatgttaccatatcattgatttttaagaactttggataataaaaataatgagaaagtctctctctctgtctctctctcactgtcttttggtgagcaatgcgactcttcccaatatcagaaactaaaatagaatttctttaactttccagctgagccccagaaaacctttcagcaaacaaacatgatggtttcatataccagttggcatgaagataaagtgttggtgctgcattttaaaggggaagtttgagaaatatgaggaaagtaactaaactagaatcaattataataggctggttatcggcaaatatacttttcagaggaacttggagcatctcaaagaaagccaggagtttagcagagtgttctacattctctttctactgtgatagacatgggcctaaacttttcatgcctctttttcattacctgtgaaactggggtcatagtagctttaccgttcttaagaacttgttataaaataccgtgtgtaccccagtgacttatggaaaaataaaataaaaaaattataaaatcacaagacaagggacttctaatgccttgttttcctcaaaaggaaacagtcttaagtgaataagtgatttgtcccaagtcagaaaacctagttgggctataataaactggaagctttttgaattggaatagatgttttagttatatagtatttaaatctttttactgaatcaggaattctctgcaatctctctggcattcattttgagatcactccttgttaagaaattgactgcatttcagggtggaacattatattattggaccactttaattgtctggcagtcattgtttttaatgtcatgtcaagttcctgtgacttctataccttgactcttatcacaagtgtgactccctagaaagcagacacttagaaattagcaagtttatcagggagtgcttttggtatccattctgtgtaaaggaagagaaaacaaataaataaacaaacaggatttgacagagaaagaagtcactctgtagtgcagtttgaatagagtgcctcagtggatgctgcagggaatttagatggaacaaactcttgagctgggatgacagagccaggcctttaaacctctctgtctatcacttactgaaagtaggctgccctgggaagggggcgtgaccttgggtgaaacagctttcttctgctgaggcaattcccaaatggggctgacatgctagggctgtttgtaggcagctaaagctttaattcctttatttctgaaaaataataaaggtgatacctcatagcattcaccacacataatacatttttagaattagtttgtaaatttctactaaaaatattcctgctgtctttaattgggattgtgttgtatctatagataaatttaggaagaatcgatatgttaacaatgttgaatcctcaatccattagtataattatttatttgagtcctctttaatttctatgggtaatattttgcagtttgcaatgtataagccacaaatacttttggatacatttgtgtcttgatgctattttgaatggaatattcaaatttccatttaaaaatatttatcactagtatatagaagtataattactgctttttatgcactggttttatcttctgaaatcttgttaagctcacttactagtcatagtagatttttaagtcaattccttagaattttctatgtccatgatcgtattgactatgaagaaagttttatttctttgtttccaatctgtatgccttttatttatttttattgccaggttgcaatggttagggcccatagtacaatatggaatagaagagccgagagcagacatcgttctgttgatcctagtctagttcaataacattcaatctttcattgagtatgatattagtagattatagtaggtgaattaaaattctagagtaacaacatgaaaaggatgcagtaagggtccattgcttagtaaagtcatacactgtctcaatttaactgcattaatactggatacaacagtagctggaacaagttgtaaataattatctactacctagctttgaaagagagcacattttacattcttatggaaacttttttttttttaatgatgaaacaaccaattctgtagcatatagaaaatgcataatgtcctgcaaaaataactgtgtagtggaaaattatctctttcagatattcatcacttactgttcactgattttcatgctgagaggttcatgcttagactactcttcaaacaagtttatctgggttgaagttttttgcctcgctccctttggacgggaggttgacattttcttattaaattcataaacatatcttctacttatataatattcaagagccagccatgactgcaggaaaatccatgagggtactcatggcctcattcttttaccacttcctctccatctcctcactgcttacataggagctcagcttcctcttaaaatccctttcagagaaccctggaaattttcaggatgttttgctcaggaaaaaggctgctcatgttgtactaattctggcttctcatttccgtctcttagttctgcttctgtgggagctgccctccctgaaaatgtgtgtttctgtagtggggtacgatccactgacgttcctgaaggaagagcagttctttaggtgcctgacttggtgaggactttgtcattgatgccttaaagcatcaatgrtcatgatgagagccttacgtagtctttcatgaagtcagctccttcacctgtcaccatcccatttttccctccacaggtgtcaygtagggaggagagaaggaaattccttggcatcccctttatcatctttaccatttctttgaccttgtccaaccagtcatatcacaaacaagcaaacaaccaagcaaaacccaaatattttcttcttttagtcaaaacacgaaaactaatatgaatattaattcatgcaaatgaaaacctgcaatgatcacccacaaaccagttacaaataaacaaatttggcctcagttggaaacctggctacacagcaatgcctccattgactagagtcagtcagttgcatgtttctattttgcaaaatcaatccaacaatcatttactgaaggctcatagagtattgctctgggggatattgaaatgaatatagataaaaagcaagaatgtaatcttcttaatgtcttctgtttagaatagcttctacttcacaaggcctttttgttttgtcattcattttcaaattaattaaaatacagctcattattttccaggcacaaatatttgctcactatatttaaacatataaatatttaaacacataaatgtccactgctaattgccaggcaattagcagtggacatttgactgcaaatggagtagagctgattgtaacattatatgcaaatgaggagtgctgaatctaatcatgcattgagatttccagacagtaaaaaattataccctctctaaaaacccaaagctttacattcaaaggtctacccaggaataaaggcagtaatggatgtcactacttgtagttatttactttaatcaccaatgccaaaaatgatatttagatgatgattgagaacattagcatcttgtaaatatcaaacatgattatttcctgtatggttcttgaacccctcactcttaagtcaaatattttcttgtgtatcatttttaataaatcagaacaacaagagctgaaatgaagacatcatcttatttaatcattttaaaaataaacacaatagttattactcttatactttataatagcctgagtataatcatacctacttctggagagacagattttcattcataagacagctttctgaaatcctcttctcatttatcaaactggaaggattggctaataaagcagtcaaaatttaaaaatatatatttagtttggttgaactctttgttttaatttaatgagctcatctagcttaaaacatatataaacatgaatatgtgtgtttcattcttccacagaattttggaagcaatacgggcgtaaaaggtttaattcatcatttctttgccacctcgattagaggttttaagcctattccttcaagctgcatgagtcatatcagaaaatatgagaaatcaacatcctgaaataacttgaattgagatttgtttaatggtgggatggagcagtatctcacaaagtgaaagctttttattaacactgaagaaaatacaaccatcatcaggcgagaagattataatggaggttgagaaggataactttggctgtggatgtttccacactgagaaaaaatgtctctgccctgatcagatgctagtgacctgctcatttcctgcatttgctatcaccaacacttcagtcctaatttcatatctactgattggtttcatatcctcctcccccttctcttcttgtcaaaattggagccacttttcaagacctagctcaggattttgctctgaaacccttcctgatcctcccggtttaatttaatcactccttcctcttcttcttaacagcacttcttatctgtaccggtcctttgaccctgaatcatatgctactttatatggttcattgcatttgcaagcctatttgtctgatcttagctagwttaaaaagsctttgagggcagaggctgtttgtttctgtgcttatactatctagtggctgtatagggggaaaaattacatgttgatgatcccaactaatccttttgctccaggatacgtggcttcctcaggacatgccatgcatatgtgaggtctattttaattcataacatcctagatatggctccagagtcagataaacctaaatttgaatctttgatccaccacttattaaatgggattttggggtacatttcttaatttctgtaagcatccatgtactcatctggaaataaagggaataataaaattgtgaggatgaaattagataatggctaacaatcacctggcatggttcctggccaataattagcacaaaatagtggcaattattattactatgggtgttgaagcatggtggaccctcaagtggctctggtagtcggggaggaggattgcttagagagtgcacagagtgctggactctatcagccagtcatcaaaatcgcagggccaaacacaatgcagtgagctcacacttaatgtagggcagtgtcaggagagaggcaaagtatgaatgagaatcatgccaacaagagtccctaatggtaataatactagaaattaggcatctggcaagtactgtttcgaggtggtcttttcagtttggttgaagacattgaacagcatctaagatttctcaaaacagaaccagtttttctgaaagggaggctagggaatgggtaggcagggttttaggtgctttgttgagtagatgagagtttgttttgtttcatgttaatgctttttcttccagcaactgcccaaagcccctcttcctcatgttggggctcagaagctgataccccaatacatggcgctttgacatgttgagttgaaggaaaagcctcaggtctctttgaccttcccctccactcccgatattctgtcttccccaaagcacagggtgaaattgttctctgargttccttgatctgcctaaagtctggaactgccaaagaataaaacaattacctctgttcccttccctgagtttgtattaattgaaatcacttttagggaagaaagattgaagtctgttaacacgcctggacagacttttgtcataaaccattgtcttctgcttcagtcccattcagtattatatagaaccatttaccagccattgtctgctctatgggyccaacagactttgtcccaggccattgtatattcttcaagcccattgaattcccctaaaaataatttactactccccccataaaatcatccatatttcctcatctcacattatcctaagaagaagggtagataaccacttgtaccccactgggtgttggggtgatcactctgtgatttctcccatgcatgttawtaagaatttatatgtcttttctagtattaatctgccttttgttgatttttttgcaaaactttggagggaaaaagggaagtttgcccttcacccctatacttttcttcttgtttgtagagtcactgactcattgttaccattttcttatctccattctcttaccaacccaatgcaatagagtttctcctacaggtcctctgaaatcactccagccaaggacattagtgtttttcttgtttctgactctatggattcattgtcatcttgtctctcaacagcatccaaatctatagaccactctgttattcctgagtttttctctgcttttgtctgctgtcagatcaaacataatcacttggtattcttttttggcttctcctactcactttccccaccaggttcctcttcctcctgtcaattaattgttaatattcctcacaattccctctttgtctctgttataactctacatcctctcctttagtgatgtctctgaccctaccaagtagtaagcactcagccgggcatggtggttcacacctgtaatcccagcactttcagaggctgaggtgggcagatcacttgaggtcaggagtttgagaccagcctggccaacatggcaaaaccccgtctctactaaaaatacaaaaattatttgggcatggcggcacatacctgtaatcccatctacttgggaggctgaggcaggagaattgcttgaacctgggaggtggaggttgcagtgagccaagatggcgccactrtattccagcctgggtgaaagagtgagtgagactctgacacacacacacacacacacacatacacacacacacacacacaaagtagtaagcactcaggagttcgataaccacctttatgttgatggcttctaaatctctgatatcagtccagatccttttcttgacctcaactacagggccaactaactactagatttctcaaacactattaagacagaactcttcacctctcccaggtctccaaatttattcttcctctcctgttccttctctcagggaatgacaccattatccattctgttgttattcaagtaaaacagactcacatccttcttgacatttcatttttttatatccaattaatcatcaaatttctactcaagcttcctkaccctgttttcctcttctgggtagataggtcttgtttgataattcatctgcaaatatatagactagagtgcttacttaaaaaccgctctcttgtttttcttttcatccacctgttaccacatagcttaatcagttttgccacatccctttcagtgtggacttagaaaatatacccccaaaaagcttcagtttcaattagctgggcgtgatagcacgygcctgtaatcccagctactcgggaggctgaggcatgagaattgcttaagcccagaggtggaggttgcagtgagccaagaatgggccactgcactctagcctgggcgacagagcgagactccgtctcaaaaaaaaaaaaaaaaaaaaagaaatgaatgygcatatgactaccatcctaatataaatggagcttatgccagtactatttgcagtagtactacttgaaataatgctcacaataaattttatgcttattaaatagtaattatacataatatagaaagtcaaatagtgctacaaaacttacaataacaacactcattaacttgacccccttccaaatctgatttttttacttctccaaggcaaccactttcaattcttttagttacactttcaacacttctattgttgtctccttatttctaaattaaatgcttatactgtgacttcttgattttaaactttaggtattatttattgacttcctgttttgagagttttgctttcttataccacwcctccccttgcctttcccccctgattaytcctctctccatcttcctaatagatttacatataatttctatttacgtttagaattttcattaccatgactatggctagagctgagccctgtagtgtactacatataataacatttttgttttactacaaatgcttttgcttttcctggagttaaaatgttcttattttaatgtgttttcttacatttctttttacctattactaaatcagtcatatgctttgcacaagcactataaaaatcttctcagtatggtcaggtttttttcttttttcttggcgaattcctcctagaaatctctatctgactactctaatcttaactggttacattctaagcctgctccacagctgttgttttagacacttatattcactcttttttggaaattccctttaccrctctccttggttctttgtaacattactggatttcctgaatactatttcttagattccatcttatttgttagagcacattctccaataatttcctgagaaaggggttaggggaaataatgttttgtagaaacttgcatgtctgaaactatgtattatattgtcacatttgattagctgttttgccagacattgagttttaaataaatttttttctgaaaatttaagccacttttccattattttctattttcagagttgatactgagaagtctattaatgcgtggatttctagtttctgtgtataatttatttttttctctctgaagctttcaggatctttctccttgatactctaaagttttgcaatgatgtaatatggcttgagtctttctaaattatttttctgggccctacttggatcatttaaatgtggaaactcacatccttcattttgaactatattcttctattatttattccagaattgtttctcctttttttttcttctcctgatcctttcattctattttctgggtgatttcctcattttattgtacaacttgtctattaaatttttgcatttgcttctatatttttaatttcaaagacctttttcttattcattcattcattcattcattcaacaatatttattgaataattatgatatgccagggactaagatagatgctggagatagacacaaacccctgcccttcagtatcttatcttctaatggttgaaggcaggtatgggattgcaagtaccaaaagatgggtgatatcaattttttgtttttttgtttttttttgagacagagtcttgttgttggctggggctggagtgcaatggcaggatctccattcattgcaacctctgcctcctgggttccaggaattctcctgcctcagcctcccgagtagctaagattacaggcatacgccaccatgcccggctaatttttgtatttttagtagagactgggtttcacccagtcaggctggtctggaactcctgacctcagctaatccatctgcctcagcatcccaaagtgctgggattacaggagtgagccaccatacccagctgatattacattttaaaaaggagagtctgggtaggcctcattgagaatgtttgatgatgcttgactgctcatcatatttacaaatgmggtatgaaaaagtaattggaagcactttgtaaatgtgtgcatgtgggggatggattgttttgtgaaccattgggccttaccatagattaattgagcatttaaccacttctttgggccctttgccttgaactgactgctttctccaggagaagctttattctcctgtctgaaacatatgtgccagactgccagcattctgragccaagtcactatgtagatcatctctctttttatttgagacaaggtctggctctgtcgcccaggctggagtgcagtggcatgatctcagctcactgcaacctctgcctcccaggccaatgcyatcctcccacctcagattcccaagtagctagggctccagccacgcaccatcatgcccagctaatttttatattttttgcagagacaggatttcaccatgttttccaggctggtctcaaacccgtgagctcaagtgatccacctgccttagcctcccaaagtgctgggattacaggcctgagccaccatgcccagtcaatatgtagatcacctcttagttatgctgtttcttgcagggactctacttgaacactcagttgtgattactgtccctgaggcaagagcctcttcagctttatttctcctgagattgaatccccagttttattccagaatagtgaagaggcagctatttgacagtctgggcttgggaagaagacacagatgtataactgatttttatacatatactgacatttgaacagtcttctttttgtcagctctgacccacacccattttgagagttatagtttcctggtggctctgctgtctgaactctctagggttctgaaccacgagaggcattacttccctctgacaaccaccatttcccccaaagctgatagtaggcttttagctttctcttttctgttagctactgctcatctacccacacttcatcttacaaaattttatcaacatctgtcacctactagtatctctgaactcatgtcttttgttttcctgggtttataccaatttcctttgcttttattttagtggagttttggaggaagacaagataaacctgccctatttaataagaagtccaaaataaaagacttaatccaaattacttgaaaacttttctgaatatatgaaataaaattttcattctcacaatgagaatagtctttcattctctatgaattctccaaataatttagtgattaagaaaacagatctattttcttaatatttcataarccttttggttacatactaaaacaatgtattaatattcttatacggtaatcatatttgagttggttcattagactttattttaacattatgagtaatttttttttttattagaaagtcttttgaattgtagggcataaggaatttttagttgtgactcctaggtctaacatttaaaaaaattcaaaacacactgtcttagcaatgttactagaattaatcaaacgctaaaattttgtaagcctgactccatagaccataaaatattggaaagatcacttgctatgaagtcaataaacttggaatttaatctcaactataccactggctacctgactttaaatgaaatgaacacttttgacctcaagttcctaatctttaaaatggggcttaaactagttggcctaataccaatattgaatgattatttgayagttacatagaaatagattggatgtagaaatagagatatgaattgcatggtgtttgctcactagaatgtggaaaactgtaaaggatgcatgaatatcaagcaaagagaaataagtcacataggttgcctgccattctttaatgcttattttctttcaattttttctttttaataatcttactaaagtgaagctggggctgttagtggtggcaaatccrtatgggyctgcagcaaccttacttcttgcctccttagaagaaagaattcaactgaggggcattaggcagagggagaaactgaggaaagttttagagcatgagtgaaagtttatttaaaagctttagagaagtaatgaaattcctttcattacttctcaagccggcgacttgagagatcaagtgcactgtttgccctttgacttggggttttgtatgttggcatgcttccaaggggttgcatcccttctccccgatttttcccttgggatgggcagtctacatgagcagtggcctgtcagcaattgggaggggagcatgcagtgtatgtactggtgttgtgcacatgctcacttgaggcattcttcctttaccagtctaatgttcctaggaggtcatctaccagttaaacttaccatttttgccttttagtgtacatgcttgagcccacttgcccaactcctgagatcttattgggaagctgctgatcacgagtttcatactttttcctatctattgggagactgcctttccttggtgccagttgtgaccaattattattttagagaggcagtttagccaccaccagaccatcacatcatagttgcctgacattcctggtgactggggggaccctcacctgctctggttatgtctgcctgactgactactgtaacagggccaggtcattttcttgcttaaacatcttactatagtccataggataaagatcatcactcctactcatgacatatgcacagccattgccagtggtttcaaaaggcttgcacatcacgaaggctcaataaatgttattgatttgaactgaacagtaaatagatcamgatggtataactgccttttagtgctcatagccaatgttctaaaacattctcctggtctatttttttgtctggctgccgtattgctatgatttctaaaaaaacccatagttttctggatcaggaagacactttactggtgggtcaggttatagagatcactgagaatgaagattttagtagtaaaatgatgtaaataatctaaatacaaacccttctactgctaaatcaattagagtcttttcccaatccttagagggaaaaaaagttaatagatttgctgaattttaactatttctctcctttatttttcatatcttttggatatttacttgattaccagggttcaagcaaatgattctcaatttgcttgaatcattgttttagatttattgtttagaataattgttttagattgtttatttcatgctgctttctgtgtgactgctctaggaacraagtcatgagtagaagccagggaggcatgaaagaaaaagtcttgtggcacccacaccgagaagatgctaagcagagatgtgaggaaacaaagctgagaattgagggacaatccaagggaaagaagtggactgggaaatsggttctcctggcctggaaaagacacgtcaccacagraaaaaatctggctccagagaacaatttattttaatatgcctcattttgctatttcattaattcagaaatacttggcctttttttctactgttactgtggaggcataataggaaatgtaaacatactggtacaaaataagaaataacttatttatatggcaggaagactagaaaaatcacagccattttcttcttcttactataagctctaattttccatgatactgctctacatacaggatctttatttaaaaaaacctgaagtgatgatattacattgccacatcaacatttgaaattaaatgatcaatgggtgatataaaaatggccagcacatggtacattttgtaatactttaagtcacattgttgagatccttgataaagatatgatttgcttttaatctggcaccatcatttattttgggcaaagctagaaaacaaataacataatttgcataatgaaaccattgagagaaaaatcactgtaatttgtcagaggtatctgcaccattttgacttacagtttaaattcattcaagtttatttctttccttaccccaactaaacaatgcttttgatttattcttgccatttagtgtcatataaaataaagtgttccactaggaggagaaataatttgtcaagtagaaactatattaaatgaaacattctctctgatatgtttttaatttgttttattcccattttgctattgcaattttcccacctgccaatggagataaggggctgtttcattctttctcttttggctcgcgaaggccacacgcttgttttgttaaggagagtccacctatcaccaggagggacagaagtcagctcaggaagggagaccctgccagggractcagccatgaggtaaggccagccatgagtccaaagacaagtattcctgagcacctgaccgctatttatcaaacattgttctaggggatgtggggaattgtaagagaagctcaagacagtgttcttgtctgggctgatgaaaccttatcctaattcaggctacagtgaatactttatgtgcaytctgagtgttcctatcctttccttgttatatggcaggagtttttgatatagggtacatggaccccaggaggcccttggatagaacacaagtggtaaaattccatcttttaaataattaactactaactgaaatttagccatttcttcaattatatatgttggcacaaaccacagtagtattaagagtgtctctgaccttgtcagcagtagaaaacactgatatttttatataatatcacagttgttgcagatatcttgraacatcatttgtgctttatcactatttttgaaaattatagtagttattagacctgcagctagagtttgttacttaatgcattcatatagaaagacatcattaaatcacatttttctggatacttttataattgtacttcaatgcaattggtgtcttttgtaatcctacgtattttctttcatacattcaaacactcatcggaggagtggcccacagaccttaacagttggccaaaggtgtcagcaatacaacaaaggtatcgaatccttatctatgatgatcagattaggtaatttctttattcacttatacttctaatagaaaaagaagagaaaaaatgaaaaaaagtaaaattaagggtttaatttcaaatgtttggtggggtggagttgttgaagtggttaacagcattgaggcttctgagttagtagaggcttaaaatttttcctttatatattcattatttctggtaattgagttattcagcatctgacctttaccgtcttgataatatttctgtctgttgtttcttgcgaaccttttctcgaatctgtcagcttgtgaccttggaaggttacttaacaccccctgccttacttttcatcattttctggttggagctaataatgcttcgtttgatgttgtatttttgtgtgtgagatcttttgtttgtaagatcttaaaagatattgacagtatttaattgaataagaatacatttgtaggcatttgaaactctaatgccttatataaatatatcaatgcaatgatttattattacagctgttatgccatagcatgttgggttgctgacaattttttatttttttttgtgacgaagttttgctcttgttgcccaggctggagtgcagtggcgtgatcttggcttactgcaacctctgcctcctgggttcaagtgattctcctgcctcagcctcccragtagctggaattataggtgcctgccaccatgcccagctaatttttgtattaatttttattattaattttatatttcaccatgttggccaggctggtctcgaactcctgacctcaggtgatccacccgccttggcctcccaaagtgacggtattacaggcgtgagccaccacacctggctgacaaatttgtatgtatgtatgtgtgtatgtatgtatgtgtttattatttttgagataggatcttgctctctcactcaggctgaagtgcagtgatgtgatcatggcccactgcagccttgacctcctgggctcaatccttccttctgcttcagcctcctgagtaacttggaaaattggcatgtgccactgtgcctgactaatttactttttgtagagacagggtctcactatgttgcccaggttggtctcaaactcctagcctcaagcaaccctcctgcctcagcctcccaaagtcttgagattacaggtgtgacccatcacacccaggcaacaatttttaaaaagaaactctaatccctcaactatatcattgttgggtaaggaataaaacataaataacgtcaaaagggggcaccttatgattatttctcatgggaacatggtgcttggaaatgttatacctctcaattttctaggatatgatgtgctgtcatcaattttttcttaaacatgcctctgacatggttaatagcacagtgcatttcctgagagttagggtggatggtggagtgaagggtcttgttaacatcatttggtgtacccatagtgatgctcccttgaccatagtttcttctcagtagttgaaggaattgcaatcatttccccttgcagagctaggaacatatgctggtagtgttaaggaacattttggtccacgcatcatcttcatttttgcagacagcatatttttaatataaccaagagtccaaaatatttcaacaagtaataaatgtaaacttttctaacaccttttattacatactgtggccaaaatacattgaagaagtagagtacaaattttgaaaagatggctgtaatgtgacacctctcctgtcatttaaatcaatattgcagctaatatatattaactttaggttgatggtgattaacccagcaccctccatgtgccaagtgttctatcctggcttttattagttactgcttaccaacatccattggtggtgctactgttcccatcttgatttgttttgagaaccttgaatatgagaaacagactctccaacctgctttctcttacaaaatcagcaggcttggggagcaatatttaaagaacacaaaaactttgatgcagacagtaaatatttccttctctccaagaaatttcatagccagcatccttatttctttgttagcatcaactgtggcattaatgtagcatccccagcctcacgtcagtgtttggagctcagttgaacaacagagtaggtggaatgggctgtgatttatgtgtatcaataagctcataggccccacccttgcttagtcaaaatcctataattagtaactgatatggttttgctgtgtccccacccaaatctcatcttgaattgtagctttcttattacctacgtgttgtgggagggacctggtgggaggtaattgaaccatggtggtgggtttttcccatgttgttctccttgatagtgaataagtctcatgagatctgatggttttataaagggtagtttccctgcacacattctcttgcctgccaccacctaagacgtgccttttttgctccttcgttttctgccatgattgtgaggcctccccagccatgtagaactgtgagtccattaagcctctttttctttataaattactcagtcttgggtatttcttcataaccgtatgaaaatggactaaaatagtaaccatctctggtgacgcctttattacagactttgcaattataagctattccttaagccacagaaagaaatgaagaaaggaagaggggaagacagaaagaaaacaattatcacttggtttagtgaccacgtgtgttgaggacaggtaaatgtttttattgtaaagccatctaagacccaggcattgggaatagggcatggttaataataattaacactagggaggcagctgacaactttggcatttagaggctcatagaaagaagaaagctcaaaatcatgtgttagcttaaaagagttgggttttagcctcccactgattctgcacaatttagtggcaagatttgaaaacaacaccaacaacactgctatctttgacattcatggaacaataaaaagtaaacacccagaaggtaacaagcctgggagatattaaccgagggatcccatggtttctcacttttccattcttccatgaagtcactgtttcacatagcttggagtctgtgaaccatgccaatatatgtgtctttttaacatggttcattttttaagtacatcattggtttggagagatgagaatgagaagatgagttaacttttattgtgaggcaccygtatggtttagactttcactgcaactttgttacaggtgagcgatatgcccttcatttcacagactctgtggggtgtccatcagcacatgagtaaagatcttcctttggagggtaaccactttctgacattaactgtgtcttgatggagaacacagcatatgagttatgagttttggcctgcgagttgtgaaagatgactcggaaaatatagccttggagaactaactcagaaaactcctctggcagcactaagccataaacagactcagctcatttctaattttggctcctcctcagatgtccaggatgacacaagccagccgtcaagcccatttctaattgctcctgttgcaatgtgttgacatctcttgtcttctttgtgaaaacgtgtgggatcatttagatgagagtagagataggaaaggaaaaggactagtttgaggcaacctctatgataatgaccagaaaggggagcaaactgaatggagtggagcaggaaggtagttgagaaagggtattagtagaaggaaagaatttggtgaaacatgacaatatttctgaagagctctagtagtaaacgcttgatgaatataggaaaaaaagaccatggtagaaaatccccacaatgcaatagagatggtaaaaaaagggaacagagcagaaaatatgaagtgtttaagattaagctaactaatagttctatgtcaatgctaatactcatgttgttctcccactatttgcatatctttctaggaatagaaaaaagaaggtacatgtctaagaaggatttaaaaatgtcaaggaaagaacaatgagatgagaaagattaaagtcagaggtgagcatcaggacttaaaaaattttttttcctgacaacaaggttattcataaaatggaaaatgccatcttaaatgctatgttacagaaataatgattgtgggatttacatatttagacccacaggctattagagctggaaagagcactaaaaatcatttagtctacttcttattttagagacaggacaaaaggcttggattgttattctcagggtcacaaaagcaattaacagccactcaggaacttaagtataggtattctggttcttagtctaggactaagaaccacagcaatttctttcctttctcataaatgtgatgattaaaaataaaggtcatgtagtttattgacttgcttgggggaaatcaacacattagaagcaaacacatgactagaacaagagtctcttgatttttggttcagagcataaatttgcttgacatgaaactatcaatggtttcatagattgagtttcctgaaatgacataaagattaatgagcaggaatcttattaggtaattctcttggaaacagtacttatagaatggaagaggaaggagcagaattgggaagaggggaaaagtgggctgtgatgcagtctaatcaaagtcataggtaatcccagaggaaagtctgagactggatggctcttggggattgtcatgagttggggcaaaggggtcagtccttcataaccctgagatcagtctttatttgctgcacccagggagaagccatgaccttgagcaargatgcgcttttcagccaggacacttaacaaagagggctgacagctgtcagcacttccagaagctggtaaaataagaccttcattcttaaagggacatcttggcagaataccaatgactattytagtccactgcttataccactcagatacacatcttcatatacatactgaaaatcaatcttctaggatcttagtaggtttcttttgctggcagaatgttgtaagattaaggttgataggataaactggtacccttgcagaaacagctagttgcaagatctcaaatgatatttatcatctctcttcttcactatccactttagattttcctcatcatctgctggtcttggtggcttcccagtggcatggtggtgaccatcctgagctcctggccaccctgtcctcttcaagccatagctgcacttgtccatttatcatcaaacgtaggcaaatagaccacatgggtgccaaacatatttcttcgtgctccccattgtatataagaatgctactttctttcagggttaattgctaccaccaagatggtgactctttttattttaagctggtcacttgctatgaggaacctgaaatgcccaggtgtcagccaaagcttatattacaactagaattttcctatgtttcctggtggaagcatttcytctttggcttgaacttcaagccatgcagctccaagagttgcaggtatgagaagcacaaatttcccaagtgggtcactgtgagtggtgataagtgggaccactcttgcttccatatatcagttcctggatccatgtattcaagcacctgggatacaataccatataaagatcattgatttagggtgtacagtgtatttgggaggttagagccccacattgacaatgtcatcttcaagctggcacttcagctgtgccttcaacgggccattccgttgctccctcagaccagcaaattttggtttgtgtggtatgtggatacaaatcagtgatccagtggtcagccaccagatacccactcttcaacctcctttcttcaatgtgaatctcttgatctgatgctgtatcatgtaggatcccacactggtgaaccaaacctctgtaagtcttcaagtagtagtgatggctgaagtgctatgggcagaaaagccaaacccatacctagaacatgtgtctattcctataaaaatgaattactgcctcttccaggatgaaaagtccaatcaccaagggactgtttggtctcctgtagagatggtgccattccagagaatttgtattggtctccgtctctagcagattgcatatttgattggaccagtcacttatcagcctcagtaagtggagggctatcctgctgatcctatgcaaaacttctaaccctgaaaatatagccattttatttatatgagtgttgtgctagcactagggaggctaatgagaaagacttgctgatgtgaactggccagctcatattgtctagcttgttatttcgtgcctcttccatggtaggtgctttctggtagatgttaacatttgatacaaaaatctttatatttcactcccattcctataggtccatgcaaatccctctacctcagaccgtatttttctgtcctttcaattttattttttcttaccccttaacctcccagtcaagccatttgccattgctcatgaacccatgcacattctaactacaggacacttccttttctatgtaaagagctcaccacatgcactgccacttgtcactgttgttaagggccacctcaatgtcaggctgtgatatagctttcatccatttcctgcttgcacacacataccaagccaacccatctctaaaccaattttttttttgtttttgaaawtgatacataataattatatgtgtttatggggcacatgtgatattttcatacatgcatgcaatgtgtaatgaccaaatcargatatccatcaccttaaacatttatcatttttttgtattggaaacattccaaattttctcttctaactattctcaaatatacaataaattatagttaagtatagttatcctactgtgctatcgaacactagaacctgtccttctaaatgtattttttgtacccattcatcaaccacttttcacgtcctctttcccaattttttccagcttctggcctatcattatgctctctagcttcatgagatcagcatttttaactcccacatatgtgtgagaacatttgatatttgcctttctgtgcctgggttattttatttaacataatgtcctccaggtcagtccatgtttctgcaaatgacagaattttattctttttatggctgaacaatactccattgtatatattccatttttttactgagcatattattataaatcttctttattttaaatttagcacattgtgctttaaaattatatccaagtaaaaccatatattcaactctttgttgtttctatacagaagtgtaaatacaacattactttttgtcactaagttgccttaataagttttacaggaagaaaaacattgaatgagaaaagatggcttaaattatatgtggcaggcctgtgaaaccatgcaatggatacggtatgtgtgtgtgtctatatatatacatatatatatattgatattattgatcttgagcatcttttcatatacctgttgcacatttgtctgtctccacatcctcatcaccatctgttattttttgtctttttgctaatagtcattttaactgtagtgaaatatctaattgtgttttgatttgcatttccctggtgactattgaacttgagcatcttttcatatacctgttgggcatttgtatgtcttctattgagaatgtttattcagatcctttgcccactttttagtcaaattattactatttgttgttgagttgtttgagttccttgtatattctatcaagctgttgcatcaagctatgcagaagcttttcagcttgatgtaatcccatttgtctatttttgcttttgttgcctgtgcttttgaggctttactcaaaaaaacccttgccaaaaccaatgtcctgaagcatgaaatttggatttttatcctcttctgtttgttggctagaagggattcccctctattttggtaggcataagatgatggtcaagagctataacatcaatagtggatgacttcaggacctaagctacctgctcatgttgtctgtttctgttaatgcttaatcctgaatgtgctacttttatctcaggatgttaaggtcctggacccaccctgaggtctgatattacccagctcaaaatgagcagttcaggcttcatggttacttggtgtccataatcagacactgcacttctaccaggacccagtagcaaaccaggacctgtttttcaaaagatgtatctgctgtagatggcacagctttactctacaaccctaggcatctgcattttgattctcccattgggctttcaacaaacaccacatggcaccttttcctaccatagattaatgctatgtcatactggtagtttatatcactcaagggaagggtcactggcaccacagtctgaatttctatagattcttttaatgctttggtcattacttaaagttagcagtctttcatgctacctgacatatgatttggtgctgtattcctgcaatggaatatgctgcctccagaacatgggaacgcctactaggcaaggtgcttccttatttgtgatagaaagtgcaaattgcaataatttktattttctttggaagggatatcccaaaatactcaaaaccataggacttctaaaaatattactaatatatcaggccctgaatctctatagagtttatctcttatcctctagtgtgtatatgttttacctaggcctacaatgtacttgtcacttcttttttctagttggttcaattgccatgacatcctagatatagtggactaatgaagttttctgtgatatcctagtcatcaagatctcttagactatatagcaactgaacagaagagttaacatagcccttggacaaggttgcaaatgtatactattgtccatttcaagtgaatgagagttctttctgattgcttttggtgtggttagaaaataatgtatttgaaggatgaatggtcacataccaggtgcctgaggttattgtcatatatactagcaaagatgccatatttgagctagtattgcttggttgagtttgtggtatccattgttattctccaggatacatctttttttttttttttttggtgggtgggggtgcggggggtgagtggttgaactaattgaattaattggagatacaatggggctcaccctcctccatccattaggtctttcattgaagccattaaatttctgccaaattccaggaagacctggaatatgacagtttattagagagtaccctggaaaaaatagccatgaaagtraaaaaaaggaagcaagcttggacagaagaaaaaactggactgaaatacaatctcagtgagtaccataactgatctctagagagctcttggtgtgcattggccctacagagctgtcctgagctaggtgaggagactggccttgatagtcttgtattgaccatttcccagatgcgtggtcaaggcagttctcttcaaccaaggcacttccaaaagaggttgatagctgaggactctgctggaagcagttccagcagctgggagaaaaggtctttcattcttaaagatgaatctggacagtgtgtccactaccaaatgaaatatgggatctcttatataatgtgataggaacctcaaaattggaatcatatattttattttttttcaaagtagaggctttcaggagcttttagtatatttgaaatgaaggataacaaaatagtaggtggggaagagaaaaagaaatggcctgccatactctaattatagaagagtacctctaactattagcatattgaacagacaccgaactcagaggagaatggtatttgtagactgataaatgagtctggaataaactacttcccagaaattgcctaaatgtagctcaggctagcgtaaactagtcaccccaggctggcttccttgtttcactgaaaaacaagtggcacttcatattatggaactaattgcaattggagtgtattccaatatattcttgagagccccaggtatacctgtgaattggaattcatccataatcagtaattatgctcttctatttaaatatttgatcttgggcaagattttatgcaattaaaggtatgagtttggtgtatattgttatacttaatgtcttattttatttaaaatatgaaaaaatgaatttaatcagaaatttcaaaaatgattccttatctgagaggccttctatgatgtcatttaaatagcaaattccttattattctctatctccttactcttttgtctttgcttttgtcactaatatataatatacagtatatttttaatggaatgactatatctcccatctctgtttggagtgtgtttcatgacagcacagaatttatctactttgtttattgcaatgttgctaacctctagaacatagtaagtgctcaaaagatggtgcctaaaaggatggaccaagtgttacacaagtcatattctatttggttaatacacttctccacttctgagaaacatattattgttaaagttaaggtagattaattatgttaagaataaatggtctgggcatggtggctcatgccctgtaatcccagcactttgggaggccgaggtgggtggatcacttgaaatcaggagtttgagaccagcctggccaacatggcaaaaccccgtctctactaaaaatacaaaaattagctgggcgtggcggtacacacctgtagtcccagctacttgggaggctgaggcgcgagaagcactcaaacctgggaagtggaggttgcagtgagcagatgttgcgccactgcactctagcytgggtartagagcgatactccatcaaaaaaaaaaaaaattaatggatgcttttggcaaattcaggactgaaaattgctgtgacttttcctccatgagagtttctgcagtttgggtcataagagttaaatatggttaatacttcattaagtactgtttaactttagcaacctaagacattacatgtcatcaattgttctgactttgtggcacctgatagctactatgctactgtggcattgatgatgttggcggtgatgatagcgatgatgattatgatgatgataatggtaatggtggtggtggtggtaatagcaggttaatattcactgagtggtttttcactaattgtcatgctgaattttgaattcactgacttatgtaatgctcactaagacattataaatacagtttaccattttaatgataagaaaactgagacatagagaatgtaatatccaacctggctggttgtggaaccagcatttgaagtggggtgagacttataccaaagactgcagatcttaactattctgatattctgagcagtggcaagcagagagaagggagagggaagtgataaaatttgaggaaaataaatcccacactccctttcaaaattgtgagtggagaataggagggaatgtttgagagcagtccagaaacatcatttaaaagcaggtaactataaggcagaaagaaaaatggcaacatcagagcataatacgaagattcatgggaaatgggagcagaggagaaggagacccagccttctggggaagacagtgtaggattagagaggaggctgtatttcagctgagactgaggaggggaggtaagacctaccagaaagaagtaccaccaatgtaaacatatcatcaraagtatgttgtgtaatgtatctaagcaatgtagtaaaaaagcgtagtggttaaactttactctcctaggatattgcggtatattttatatttgctatatatagtacatagtagtatacagaatatgtgtatatgtatatgttactacgtaatatacatatactactttccaaatagtatactgcagtacactgccaaaagtaatacaactgatgggcctaaaacaaaacacatttctttcaagggatttgtcaatcaaaaatagtgaaacaatagtaatgcttcattcctctcaacaacccacaatcctcatttctgtatatcctttacttacacagattcaccaactgtttacattttccacatttgttttatcatacatgtatatatataattattattatagctaaatcactaaaatgcttgagagtaagtttcagacttaaagactttaccacaaaatatctcactgtgcattttctaagaacaaggacattcttttatctagccaccatataactattaaacttgtacaatttagcattgataaaaattatctttgaacatacaatccatattcagattttaccaattatcccaataacattctttataacaatttctcctagtccaggatcaaagccagtatcacacattgcattgaattcatatcactttaatcttctttaatttagaagatttcctcagccatttttgcttttatacattaacattttgaagtgtataggccagttgttttgtaaaatgaaactcaatttggatttgcctatttcctcatgtaaattcaggtaggtagttttgcttaggaactatgtatgtgatttatgtcctctgtgacatcaatggtgtcacagatattggtgatgttaattttgatcactagattaaggtgttatctgtcaggattctccattgtaaacatgccattttccctttaaaaccaaataaactgtggggtgctaccactgaaagtatgtaagtaccccaagaaatcttcactcaatgatttcagcacccattaatgattcttgtctgaatccattatgactatatgattaaaaatttttgaatttttcattcaatcctttcatatattttagttagcatttctctcattgttttgtgagcaatttcttactttttggcacagtaaaatattccaggttccacttgtaatttctctctccatccgtggaatcagttgtttccttaaatagccctgcttcttttattggataatggtatcttgaaaccaagacttgggtgttggggtgtggctttttgctactagggtgttattgcacatataatgttccctcctcagccatggggcctacattccaaggtcttcagtagatgcctgaaaccacagatagtactgaacctgatgtaataagttggaacatgttcctgtttatgtttttttctccaacaaacttaatgccttttccatcttaattatgcatttatcatgcatggtgcccattacttttgcagtctgaggtgtgacagcaaaactggcatgaatttttttcctttttcacaatttcataggtagaagattcatattttactgtaaatcttgaaaacctcagcataagatttttcctttccttattaagttgagaacttacacattttcacttaaaggaagcacttaatggcttctctttcrcagatccaaattatcagcatcactactattgcattttggggctattattaagtgaaataagagtaacttgaatagaagcatagtgataacgcaacagcagatctgataactgagatggctcataagtgactcatgggcagagagtatactgggcaaaaggaggattcatgacctgagtgggatggagcaggatggtgtgagatttcatcatgctacttagagtgacatgcagtttaaaacttatgagttgcgtatttctggaattttgcacatattattcttgtactgccattgactgttggtaactgaagccacaaaaagtgaaactccagataagaggagaattctgtatatagatgatatgatttggccctgtgtccccacctaaatctcaccttgaattgtaataatccacatgtgtcatgggagggactgggtggaaggtaattgaatcatgggggtgggtttttcccgtgctgttctcttgatagtgaataagtcacatgagatcagatggttttgtaacggggacttcccctgaaatgccctcttgcctgccgccaagtaagatatccttttgctcttccttcatcttccgccatgattgtgaggcctccccagccatgtggaactgtgagtccattaaacctcttttctttataaattacccagtctcaggtatgtctttattagcagcatgggaacagactaatacaatgcatttgactactgcttaatgggacatttgttattgaacaacaaacaagtggaccttttaggtacatcattttgggagtagccatcagttattcaaagctaaaatctagttgaaatcatggttttaagaatccttattgtaactatgacaataaaagactgcatcatcttttaaaatcttcttgagattaacaatcaagtctcatgatcgattggttggtaacacagattctataaccatggatttttgagcttgtgttctttatccttttgatttgataagaatgctgaaactctgggaaggcatcaaagttaacattgccataacactagaaatatgtgaagaaatatagaagtaacgaagaaaataagtcaaatgtgttgttaatcttctagaacaagcttaagtctggctatagtaatatattttcaaaacattgtatttctgtatgttttgtctactaatgaaggtgttggaggcattcaaaggaatcattaaattcattctaaatcagtaagtctattctaaagtgtttaaagagatttaattaattaagtttataataagtgttaaaatatcaaagaaaaatgtattggaagttttactggcaaaaatttaataaatagagaattcaaaaatacagcaaagaatgagtgttttccatgcacaaaagctccctgatattaaaaagctgaggggtggatggatgggctttgaggtaggatctgggcagagcatcactgtatccactacaattgtcattttattttaccttccccttgtaaggtcaaataaaatgttagaatatatagattcatagactatcaactctgagagggaccttaaatatcacatactttattatggaacacttagcacagataaaaaaattcaaacactcactaagagtcacttcatcaaggtaccaaaacataggttaagctacttcactatgttttagatgctcacactgtatctttcttcacgacttcataataaagattaagcgttgtgttttggatagtccacgttgtgctgtaagtgtgctactaaattccataccagatactgcctctgagaagcttcagaagaagcaatgaattataaagaatgctaatgcgtagtaaccaggggttacaggtgggaacatcacaatcactacctaggacagctgaaattcctagaagcagggaattgaaccagggaccaaacaaggtccctatcagctctttagctctggactgaattgagaaagtattattgtttttaactggttcccatttggccttattaagagtttaattgtgcttttactctaaccttttatcctcttgacatttctttccttaattttataggtttttttgtctcccttcattataattttcttcttatattatactatatttccatctggaaaaagaagtctgtgtctgccactttgttagaaggaccagcagaaaaatattcttaagaatagaaattgcctttattagctgagttgatgaaagaattatatgaggcaattatttcccacatctctgagatcttggccatgaattttaacaataattgcttgcaagtgtattttcttttctattgtatttaacttgagaggaaagatacttctttacctctttgtttccccaataactggtataggtcctgacacatggtaaactctcaataaatgtttttaaatgaattaataattggtaacatgttataattgttcattcaaatatctacgtctttactagactgaatttaaagaatggaataaaatcttattaacctttgtactactactagttcctgcattaactgtttatgtagtaggtactcaatacattgcaatgaatgaaggaatgaaaaaagaaatgagatggactaggaggaactctgcatctttactttagggttgtggatgtaaaattatttttcttccattcctgtcattgatgtgggcaattccacagtattcttatgtactgcctgctgctaaaagagcctcttgatgaaataaatctagaatttagtaagaactcaaggtaatttttagaaatgcaattacttcttcacagggtgagagcactggctacctaaagtgaaaggaaatgattatggtaggcaaagaatactgaaaggagaaagctttgctactctcttaatgtttccctgggtcatccccaggtactatggaaagacattgagacagtctagcctagtgtgtaagtactaaaatcagaaagaaaagcatatgcaacagcatttctataggactaaagaggaaagcaagtgaaacaaggcaaatggacaaacgaaaagcttcaataattcatcaaagaaacaatcaaaaatagatttaagtgcttactgtgtcctaggaattgtgataggtactgtagatatagcaataactagcaaatgttttctctatgctaaagagtttcctaggttgtaggggagattgatattgaatgaataccctcatgaaaaatgatatgtttacagttgaaaaagtgatatgaaggaaaaaaaatctggttccatgttgcatataacaatggggctaccctaatctgaaaggtcagcaacaacattcctgaggaggcatcttataacactagagggacaaaaaaaggcattagtaatacagagagagaaggaaagctattctagatacaactgagagttcatgaaaagaccccaagacagaacaagcttgaggtttcttagaaccaaaagattgttatggttggagcttagtgagaaagggaaagaatggagcaaattacagtgggagaggaaaacaaaagcatcagataaattatgtaatgcctgaaggccaaggagctagggtcttattttaataggaagatattgactaatttaatagaatttatggaggtatatcacccaatttatatttttataaataatgaatgtggaaaatggcaaactaggaagctccaggctctccaactccctcagaaataccaagtaaacaacaacatacccatcaaggtagctctgtgagaactctagaaaccattaaggatctgcaacaactaacaaatgcataaccaagaaaaatccacaggcaaaatagtagaaattttgtggtactttttcagatttaactcactgtttccctgatgcagcaaggaagagaagccaaccaatgactgattattctttcgggataaaaaataaaaagagtaacgcttatttgcaacattctggctcatatagggggctggccaagggacttgtttctatcttgcctgacttgaaatattgacagaaattatggcagagtttggatgtcaagttgggagttgctgaaaacagtttagtcatgatggcatgagagggcttcaggataactgcagacccattggtgcctggggcaagagattacaggaagaggaatacagtagaacatctaaggccctgagaaggagcagaggtgagactcttctgggaatcaagattttaaaagcaagggaattggataaaaagcacatgcactggcccaggaaagatgaattccaggaaaaggcctgaggaaaccttaagcttttacaccgggccagtttgtgaaggtcttcccctgcatggagccagtttccaaagactatctatggtggctattttattcaaatgccaaattttcaacagtgtattataaagcatataaagaaacagagaaacatggcctcttcaaattaacaaagcaaatataccaaaactgacctgaaagaaacaggcttcagacttacttgacaaagattcaaaagcacctgtcttaaatatgctcaatgagataaaagaagtacaagggcaacaaactaaaggaagtcaggaaaataatatatgaaacaatgaggattttaacagatataaattatgaaaaagaaccaaacataaattcttgaactgaaaaatacaataactgaatttaaaaattcactagagggcttcaacagcagacttgactggatagaaaaaagaatcagcaaacatgaagctaggtcatttgaaagtaagaagtctgaggacaaaaaaaagggaagtatgaagaaaagtgaacagagcctaagagacttacggaataacagtaagtggaccaatatacatattacatgagtcctagaaagggaagagagagagagaaaggggaagaaagtttatttgaagaaataatagctgaaaaaaatatcaaatttgaggaaaaacatggaaatacttttcaagaggctcaatacattctaggataaaccaaaagagacccacactaagacacattaaaatgaaactggaaggtgaaagacaaagaatcttgaaagcaataagagaaaagctatttttcatgtacacaggatcctaaataagattatcagaagatttctccccagaaatcttggaggcttcaaagtagtggagtgacatatttaaagtgctggaaaaaaaatcctgtccactgaaaatttgatagttggcaaaaatccttcaaaaatgaggaacaaattaagacatttccagataaacaaaagctgaaagagttaaatgtcattatgcctgcctacaagaaatgctaaagaaagttcttcaatttggaatggaaggacactagacagaaactcaaaaccataggaaaacatacagtttccaagtaaaggtgaacacgtgaacaaatttaaaaactattgttgtaattatgatcaataactccacttttttgttttataggacttaaaaaacaaaataaaaaattataaatctatgttaatgaatacacaatatataaaggtttactttgtaacatcaacaaacaacataaagtggggggtaggcagagcaataaaggagtaccattttttctgtatttggttaaagttgtcattattttaaaatagattgttacaactttaggacattatataatccccatggtaatcacatagaaaaatatctatagaatatacacaaaaggaaatgagaaggaaatgaagacatatcattacaaaaaaatcaaacacaaaaaaagcagtaagggaggaaaagagggataacaaagccacaagatatatagatagcaaataacaaaatggtaatagtaaaaactttcatatcagtaattactttcaagtcatgtaaatagattacattccccagtcaagagacatagattggtagatgggcaggatggaaaaagaaatcaaactacccaactatatactgtgtacaagagcatatagttggaagtgaaagatttaaaaaaaacatatttcaagcaaacagtggccagaagagagcagaggtggctatactaatatcatacaaaatagactttaaataaaaaactattacaagagacaaagaaggacattgtagaatgataaaagggttaattcaccaagaagatataataatcataaacatttatgaatcaaacattagagctcctaaatacagaaataaaaagtggacagaattgaagggagaaattgacagtgctacaattttagtaataaacttcagtacccgacctttaataatgaatagaaaaatcaggcagatcaataaggaaatagagaacttgaacagcactatagacaaattggagccaatagatacagaacactacacccaacagcagcagaatacatattttctcaagtatgcatggaacattctctagaataaatcacatgttaaaatacaaaacaaggcttaataaattttaaaagattaaaatcacagaaagtatcttttttattacartggaatgaaactagaaatcaacagcagaaggaaaactggaaattctacaaatatgtgagttagacaacacgatattcaacaatgaatgggtcaaagtgaaatcacataggaaattgtaaaatatcttgaggcaaatgaaaataaaaacaccatgtgttgaaatgtgtggaatgtaagaaaaacagtgttaagacagaagtttacagttataaatgcttacattaaaaaatgcaaataaataacctgaatgtatacatatgtaactaacctgcacgttgtgcacatgtatcctaaaacttaaggtataattaaaaaaaagaaaaataaataaatattaaaattcaaaaaaaaaaaaaaagagaaaaaggaaaatagagagggaaaaagctaagatggctgactagatgcagccaggaaacatctatcccacaaagagaactcaaaatattgagtaaatcatcagacttcatacagatcttttgagagaaaacacttaaaatcaataaacacagagacactgaggttgaagagggaggaagctgggaagcctgcacagagtcatcgagtagcaggactggcttctggtcctgaacaggtcgcaaggaaggggtgagtgaaggaactttggggcaccacacccctgccatggacctctgggatcctagctacaagagagcccgtgaccccaacggacatttgaattggcagggggaagtgcctgaagagtaggcagaggtagagctcaaacctgcatggagcccagaaggttttgcagtgcacagggcagctacagcaaaatgcaaccataagttcccatccctcaagactctccgtctttccctgagtaagtgtagcccttgctgactgtcaggctgggagagaggagggctacctttctcatgggaccagggcacatctgatccacatgccgtcttttctgctggcctcatgctccttcaaaagggtacgtacagcacagcctctactaacccacctgagtgttttggcagcttcctgggagcagttcatatccccagcactgctggtgcttgaccccagggagcctgaagacaaaattgcaggatggtcccaaccccccagagttcaatcataccacccaagggtattgagctgaaatctgtggccagagctcaagcaggaaggagccccactctcaaaacacagagaagaatgaggcatgggttcctgtgtcagtgtgagtgctagatgttcctccctctgcaaaactggtctggrcaaggtgtagtctgttggccagccacagcttctgtttgagggagccctggaagagcccagtgatctgggcacagaaggttttggacgagtttagctgttcaggcctgctcctgtggcagacactggagggagacctggtagggagatggtgagctgggtggactccacagccatttgctgggctaaaagatcccagggcaagggcatcacaccaactgcacacctgtggcaccacagccctaccaagggatcctccacccttgacccactgcatcacgagaccaccaccagacatatcccacaacctggtgtgactctcccaaactcagaggactagcaggttcacagagagttgcaactgtccttgtgacctaatctttggcattggccacccctaatggagggccgagtgcagcctacaagggccccttttgggctaaggagatgtagatatggtgccagtgattgaagggggtttctccaaggtctgggaacagccttggtgagagggtcatctcttgccccatctccccctccccagagcactgctgcataatcgctgaaatacaaaagtggtccacagctcagtaagagcctatttgctggcccatattcttaagtgctatctactgtatcaaagcttgaattataccaccaaacaaaaataaatttcttcagcatagaaagcctgtgaaactcaaagcaggaaactagccacaactaaggaacccacacagaactttggccctctgaaagcacccagaaaagaagccaatagattatgcactagaagtaccacagtcargccggatgcagtggctcatgcctgtaatcccagcactttgggaggctgaggcaggcggatcatgaggtcaggagatcaagaccatcctggctaacatggtgaaaccccatctctactaagaatacaaaaaaattagccaggtgtggtggcaggtgcctgtagtccctgctactagggaggctgaggtaggagaatggcatgaatccaggaggtggagctttcagtgagccaagatcacgccaccacactccagcctgggcaacagagcgagacttctctctaaaaaaaaaaaaaacaaaaaaaaccacagtcaaatcctcaagggaaaaaatatagaaacaaaaagccccattcgcacaacagaaactacaaaaagaaaagtaaacaacagacccccagataaaatgtaatcagggaaagaactccagcaattcagagagtcagagtgttttcttacttctgaaggattgcaatagctccccagcaatggatcttaaccggattgaaatgtctgaaatgttagacatagaattcaaaatctggatggaaggaagctcaatgatattcaagagaaagttgaaatccaattcaagaaagccagtaaatgatccaaaaagatgacatggtcattttaagaaaggacaaaaatgaacttctggaattaaaaaattcactacagaaatttcaaaatgcaatttgaagcattaacaacagactagagcaaggtgaagaaagaatttcagagcttgaagaccaatcctttgaatcaaccaagtcagacaaaaataaataaagaaagaattaaaaaaaatgcagtctttaagaaatatgggataatgtaaagagactaaacctgtgagtcactagcattcctaattgagaaagagaataagcaatgtgaaaaatatatttgagaatacagtcaacgaaaatttcccaatctctctagagaggttgatatgcaaatctgagaaatacagagaaactgcaataggtattatacaagatgaccatctccaaggcacagtcatcattcttttcaaagtcattgttttttttctaagaaatccaagaaacacagagaaactgcattagatattttacaagatgaccatctccaaggatcataatcatgattctttccaaagtcaacacaaaagaataagcttaaaggcagctagaaattatggacaaatcacttacaaaagaaacccatctagctaagagaagccttctcggcagaaaacttacaaaccaggagagggtgggggcctatttttagtgttcttaatgtaaaagaaattccaacctagaattttgtaaatcactaaacaaagcttcataagcaaagaagaaatcaaatattttccagacaatcaattgctaaaggaatttgttaccactagaccagccttacaagatatctgtaagggagttctaaacatggaaacaaaagaacagtatctgctaccaaaaaaacacacctaagtacatagctcatagaacctgtcaagcaactacataattgagagtacaaagaaaacagctaccaacaccatgacaaaatcaaaacctcacatatcaatattaagcttgaatgtaaaacaactcagccatctgctgtcttcaagagactcttctcacatataatgacaccaaaaggctcaaaggaaaggaatggaggaagatctatcatgcaaatggaagacatagaagagcaggcatagctgctgtcatatcagataaaacagactttaaacgaacaatggtagaaaggacaaagaagagcattgcataatgttaaagggttcaattaaacaggaagacttaactatgctaaatataggtgcacccaacatgggagaaccaagattcattaaaaagtacttctagtcttatgaaaagacttagacagtcacacagaaatattgggggacttcaacactctgctggcagcattagaaagattgttgaggcagaaaattaacaaagatattctggatttaaacttgacacttgaccaattagcctaatagatacctacagaatactccacctaacagccacaaaatgtatattcttctaatctgcacagggaacatactacaagattaatcacatgccttgaccatgaagaaagtcttaataaattaaaaaagatgaaattataccaaccatagtcttgggccacagtagaataaaaatagaaatgaataccaagaagatacctcaaaaccaacattacatgtaaactaaacaacttgctctgaaatgacttctgggtaaacaacacaattaaggcagaaattaaaaaattctttgaaataaatgaaaatagagacatgccataccaaaacctctgggatgcagtaaaagcagtggtaagaggaaagtttataatgctaaacacttacatcaagaaattggaaagatctcacatgaacaatctaacatcacacctacagaaactagaaaaataagaacaatctacctcaaagatagcagaataaaagaataacaaaaatgagagcacaactgaatgaaattgacaccccaaaatccatacaattaacaaaccaaaaatgaattatttgacaggataaacaagaatgatagcctgctagccatattagcaaagataaaaggagatctaaataaacacaatcataaatgacaaagatgatgttacaactggtctctcagaaatacaaaagattatcagagactattatgaacagatctacggaaacaaactagaatatttagaggaaatggaaacattcctggaaaaatacaaccttccaagtttgaatcaggaaaaaattgaaacccagaataatgaattctgaaattgaatcagtaataaagaatctactaataaaaaagagccctgaccagatggattcacaaccaaattctaccagaagcacaaagaagagctggtaattctactgaaactattccaaaaaaaatcaaggaggagggattcttccctaactcattttacaaagtcagcattactctgataccaaaacctggagaagacacaatgaaaaaagaaaactataggccaatatcccagatgaaaatatatgctaaaatccttaaaaaattactagcaaactgaatccagctgtacatcaaagagataattcaccacagccaagtagactttattccttgtatgcaaggatagttgaacacacataaagaatacatgtcattcaccacataaacagaattaaaaacaaaaacatatgatcattttaatagatgcagaaaacgtttttgattaagtccaatacacctttattataaaaaccctcaagaaactaggcattgaagaaacatacctcaagataatgacatctctgataaacccagagtgaacatcatactgattgggcaaaagctggaagcattcttcctgagaaatggaacaagacaaggatgccctctctcactattccttttcagtataaaactggaaatcttttctggaatattcaggtaagagaaagaaataaaaggcatccaagtaggtaaagaaaaagtcaaactatctcccttcactgatgacatgattctatacctagaaaaccctaaagtctttgccaaaaaacttctagaactgataaaagagtttaagtaaagtttcagtatacagaatcaatgtacaaaaatcagtaacatttttatatatatcaacagtgttcaagctgagagacaaatgaagaatgcaatctcatttacaatagctataaaaataaaataaaataaaaaataaaataaaataaaataaaataaaatacatctgaccaaagcggtgagagatcggtacaaagataattaaaaaaacactaccaaaagaaatcagaaatgacacaartggaaaaacattccacattcaaggactggaagaatcagtattgttaaaatggacatagtgctcaaagcaatgtacagatacaatgctatcattggtagtttcctatcaaactaccaatgtcatttttcatagaattagaaaaagctattataaaatttgtctggaaaaaagagtccatatagccaaagcaatcctaagcaaaacaacaacaaaaataaacaaagctagaggcatcatattacctaattttaaactatactacaatgttactgtaagcataacaacatggtacttgtacaaaattgtacatatagaccaacggaacaaaatcaagaacctagaaataaagccgcacacctacaaccaactgatcttcaacaaagtcaacagaaataagcagtgggaaacaggctccctattcaataaatggtgctgtgataactggctagttatctggaccccaatttatcaccatatataaaaattaacccaaggtggattaaacacttagacctcaaagtataaaaattctagaagaaaacctaggatatatccttctggacgttggccttggcaaagaatttatgcctaagtcctcaaaagcaattttataaaaataaaaataaaaatcaataagtgagacctaattaaactaaagagcttctgcacagcaaaagaagctatcaatggaataaaaagataacctaaagaatgagagaaaatattcacaaactatgcatctgacaaagatctaatatccagaatttataaagaactaaaataattcaacaagtagaaacaaataatcccattttaaaaattgggcaaaagacataaagaaacacatctcagaagaagacatgcaaatatccaacagatatatcaaaaaatgctccacatcactaatcataagagaaatgaaatcaaaaccacagtgagataccgtattcatctgttctcatgttgctaataaagacataaccaagactgagtaatttataaaggaaaaaggtttagttgacccacagttcagcatggtttgggaggtctaaggaaacttagaatcatggccgaaggggaagcaaacatgtccttctttacatggcagcagcaagaattgctgagcaaaagggggaaataaaaccatcagatctcgtgagaactcactatcatgagaacagcatgaaggtaaccaccttcatgattaaattacctcccaccaggtgcctcccatgacatgtgggggttatgggaactataattcaagatgagatttgggtggggaagccaccaaacctcatcaaacagtatctcacaccagtcagaatagctattattgaaaagtccaaaacaataaatactggtgaagctgcagagaaaagagaacccttatgcacaattggtgggaatgtaaattagttcaaccattgttgggagcagtttggacttttctcaaagaactaaaatagagctaccattagacccagcaatcccattactgagtatataccaaaagagaaataaatggttctacccaaaagatagatgcactcatatgttcattgcagcactattcacaatagcaaagatatggaatcaacctaggtgcccatcaacaggattggataaataatatatggtacatatacaccatggactactgtacatccataagaaagaatgaaatcttgtcctttgtgttattatggatgcagctgggggccattatgctaagtgaattaacacagaaacaaaccaaatactgtacgttctcacttataagcaggagctaagcattgggtacttatggacataaagatgggaataatagacactagaggagggagaaaggtagaagggcaaaggctgaaaaactatctgttgtatactatgcttactatctgtgtgacaggatcaatcatacaccaaacctgagcatcatgcaatatacctatgtagcaaacctgtatgtgtacccccaaatctaaaataaaagtaaaaacaaaggaaaatagaaaaagataaacaacacagattagaagaaaatagaaaaagcatacagaaaattaatgaaatcaagagttgtttcttccaaaaggtcaacaaaattgacaaacaaaactttagctagattgactaaggaaaaaggagatactattcagatagctaaaattagaaatgaaagcaggaaccttccaaccaattttatggaaatgaaaatgattgtaagtattatgaaaaaggataacctagataaaatggatatattcctagaaaaaacaattcatcaagtctgagtcttgaagcaataaaatctcaacggtgtataactattaaggagactgaattagcaacttaaaacctccccacaaagaaaaattcaggtgcatatggcttgactgctgaattctcacaaacactaaaaaaaaaactaacatctgtctccctcaaactcttccaagaaacatataagtaggaaacactttcaaacttattctatgagaccaacattaccctgaggtcaaagccagaaaaaaacattgcaagaccaatatccctgatgaatattgatccaaaaatcctcaacaaaataatagcaaaccaaattcaacagtacattaaaaggtttcaacacctatgttcaaaatatgaatattgatcaatgtaatataccatattaacagaatgaagaaaaaactcacataattctctcaattgatgagaagaaacatttgacaaaattaacacacttttcatgataataacatgcaacaaactaggaataagaggaaactacctcaacctaataaagaccatatatgaaaagcccataactaatattatactcactgttgaaagattgggggggtgaagccaagatggccaaataggaactgctccagtctacagctcccagtgtgagcgatgcagaagacaggtgatttctgcatttccaattgaggtactgggttcatctcactggggagtgtaggaaagtgggtgcaggacagtgggtgcagtgcaccgtgcatgagctgaagcagggtaaggcatcacctcwcccaggaagtgcaaggggtcagggaattccctttcctagtcaaagaaaggggtgacagacggcacctggaaaatcaggtcactcccaccctaatactgtgcttttccaatgggcttaacaaatggcacaccaggagattatatcctgcacatgactcggagggtcctatgcccacagagcctcgctcattgctagcacagcagtctgagatcaaactgcaaggtggcagtgaggctgggggagcggtgcccaccattgcctaggcttgagtaggtaaacagagtggcctggaagctcaaactgggtggagcccaccacagcttgaggaggtctgcctgcctctgtaggctccacctctgggggcagggcacagaaaaacaaaagacagcaataacctctgcagacttaaatgtccctatctgacagctttgaagagagtagtggttctcccagcatgcagcttgagatctgagaacaggcagactgcctcctcaagtgcatccctgacccccgagtagcctaactgggaggcaccgcccagtaggggtggactgacacctcacatggccgggtactcctctgagacaaaacttccagaggaacgatcaggcagcagcatttgtggttcaccaatatctgctgttctgcagccaccgctgctgatacccaggaaaacagggtttggagtggacctccagtaaactccaacagacctgcagctgagggtcctgactgttagaaggaaaactaacaaacaggaaggaaatccacaccaaaaacctatccagccagagagaaaggtcgagttatctacaaagggaagcccatcagactgacagcagatctctcggcagaaatctagaagccagaagagagtgggggccaatattcaacattcttaaagaaaagaattttcaacccagaatttcatgtccagccaaattaagtttcataagtgaaggagaaataaaatcctttccagacaagcaaatgctgagagattttgtcaccaccaggcctgccctacaagagctcctgaaggaagcactaaacatggaaaggaactactggtaccagccactgcaaaaacatgacaaactgtaaagaccattgatgctaggaagaaactgcatcaactaacgagcaaaatagccagctaacatcataatgacaggatcaaattcacacataacaatattaaacttaaatgtaaatgggctaagtgtgccaattaaaagacacagactggcaaattgaataaagagtcaagacccatcagtgtgctgtactcaggagactcgtctcacgtgcagagacacacataggctcaaaataaagggatggaggaagatctaccaagcaaatggaaaacaaaaaaaaggcaggggttgcaattctagtctctgataaaacagactttaaaccaatacagatcaaaagagacaaagaaggccattacataatggtaaagggatcaattcaacaagaagagctaactatcttaaatatgcacccaatacaggagcacccagattcataaagcaagtccttagagacctacaaagagacttagactcccacacaataataatgggagactttaacaccccactgtcaacattagacagatcaatgagacagaaagttaacaaggatatccaggatttgaactcagctctgcaccaaacagacctaatagatatctacagaactctccaccccaaatcaacagaatatacattcttttcagcaccgcaccacacctattccaaaattgaccacatagttggaagtaaagcactcctcagcaaatgtaaaagaacagaaattataacaaactgtctctctgaycacagtgcaatgaaactagaactcaggagtaagaaactcactcaaaaccgctcaactacatggaaactgaacaacctgctcctgaatgactactgggtacataacgaaatgaaggcagaaataaagatgttctttgaaaccaacgagaacaaagacacaacataccagaatctctgggacacattcaaagcagtgtggagagggaaatttatagcactaaatgcccacaagagaaagcaggaaagatccaaaattgacaccctaacatcacaattaaaagaactagagaagcaagagcaaacacattcagaagctagcagaaggcaagaaataactaagatcagagcagaactgaaggaaatagggacacaaaatcccttcaaaaaatcaatgaatccaggagctggttttttgaaaagatcaacaaaatggatagactgctagcaagactaataaagaagaaaagatagaagaatcaaacagacgcagtaaaaaatgacaaagggtatatcaccaccgaacccacagaaatgcaacgtaccatcagagaatactattaacacctctatgcaaataaactggaaaatctagaagaaatggatcaattcctcaacacatacaccctcccaagactaaaccaggaagaagttgaatctctgaatagaccaataacaggctctgaaattgaggcaataattaatagcttaccaactaaaaaaagtccaggaccagatggattcacagccgaattctaccagaggtacaaggaggagctggtgccattccttctgaaactattccaatcaatagaaaaagaggaaatcccccctaactcattttatgaggccagcatcatcctgataccaaagcctggcagagacacaaccaaaaaagagaattttagaccaatattcttgatgaacattgatgcaaaaatcctcaataaaatactggcaaaccgaatacagcaacacataaaaagcttatccaccatgatcaagtgggcttcatccctgggatgcaaggctggttcaacatacgaaaatcaataaatgtaatccagcatacaaacagaaccaaagacaaaaaccacatgattatctcaatagatgcagaaaagtcctttgacaaaattcaacaacacttcatgctaaaaactctcgataaattagttattgatgggaygtatctcaaaataataagagctatctatgacaaacccacagccaatatcatactgaatggacaaaaactggaaacattccctttgaaaactggcacaagacagggatgccctctctcaccactcctattcagcatagtgttggaagttctggccagggcaatcaggcaggagaaggaaataaagggcattcaatgaggaaaagaggaagtcaaattgtccctgtttgcagatgacatgattgtatatctagaaaaccccattgtctcagcccaaaatctccttaagctgatatgcaacttcagcaaagtctcaggatacaaaatcaatgtgcaaaaatcacaagcattcttatacaccaataacagacaaacagagagccaaatcatgaatgaactcccattcacaattgcttcaaagagaataaaatacctaggaatccaacttacaagggatgtgaaggacctcttcaaggagaactacaaaccactgctcaatgaaataaaagaggatacaaacaaatggaagaacattccatgctcatgggtaggaagagtcaatatcatgaaaatggccatactgcccaaggtagtttatagattcaatgcgatccccatcaagctaccaatgactttcttcacgaattggaaaaaaactactttaaagttcatatggaacctaaaaagagcccgcattgccaactcaatcctaagccaaaagaacaaagctggaggcatcacactacctgacttcaaactatactacaaggctacagtatccaaaacagcatggtactggtaccaaaacagagatatagaccaatggaacagaacagaaccctcagaaataatgccgtacatctacaatcatctgatctttgacaaacctgagaaaaacaagcaatggggaaaggattccctatttaataaatggtgctgggaaaactggctagccataygtagaaagctgaaactggatcccttccttacaccttacacaaaaattaattcaagatggattaaagacttacatgttagacctaaaaccataaaaaccgtagaagaaaacctaggcattaccattcaggacataggcatgggcaagcacttcttgtctaaaacaccaaaagcaatggcaacaaaagccaaaattgcaaatgggatctaattaaagtaaagagcttctgcacagcaaaagaaaccaccatcagagtgaacagacaacctacagaatgggagaaaatttttgccacctactcatctgacaaagggctaatatccagaatctacaatgaactcaaacaaatttacaagaaacaaacaaacaaccccattcaaaaaggatatgaacagacacttctcaaaagaagacatttatgcagccaaaaaacacatgaaaaaatgctcatcatcactggccatcagagaaatgcaaatcaaagccacaatgtgataccatctcacaccagtagaatggcgatcattaaaaagtcaggaaacaacaggtgctggagacgatgtggagaaataggaacacttttacactgttggtgggactgtaaactagttcaagcattgtggaagacagtgtggcgattcctcagggatctagaactagaaatgccatttgacccagccatcccattactgggcatatacccaaaggattgtgaatcatgctgctataaagacacatgcacatgtatctttattttggcactattcacagttacaaagacttggaaccagcccaaatgtccagcaatgatagactggattaagaaaatgtggcacacatataccatggaatactttgcagccacaaaaatcgatgagttcatgtcctttgtagggacatggatgaagctggaagccatcattctcagcaaattatcgcaaggacaaaaaaccaaacaccacatgttctcactcatagatggaaattgaacaatgagaacacatggacacaggaaggggaacatcacacaccagggactgtagtggggttgggggaggggggagggatagcattgggagatatacctaatgttaaatgaggagatgatgggtacagcacaccaacatggcacatgtatacatatgtaacaaacctgcacattgtgcacatgtaccctaaaacttaaagtataatactaataaaaaaagaaagattgtaatcttttcctttaagattatgaacaagataaaatggtgagaggtgcccctgtcaccatttctattcaccacagtacttgaagtcctaatcagagcattagacaagaaaatgatataaaagacattcagttgttctctgtctttgcagattacatgatcatatatgtggaaaaccctgaagattaacatacatacacagaaacctcttagaactattaaatgaattcagcaaagttgcaggatacaaaatcagcacaccaaaattattttgttttttatacactggcaatgaacaactttgaaaggaaattaagaaaacaaattccatttaaaatagcattgggaataataaaatacatattaattaacttagccatggagatgaaaggcttatacctgaaaattacaaaatattgctgaaaacaaataaatgggaaatcatcctatgtttgtggattggaagacatattactgttaagatgttgatactacctagggtagtctacagattcagtgcaatccatatcaaaaccccaaaacatttttgcaggaatagagacaacctgttgagttagagaaaatatttgcaaactactcatccaacaagggactaatatccagactatacaaggactcaaacaactcaacacttaaaaaaacacaaagaatcccattaaaaagttggcaaaggacatgaacagacatttctcaaaagaaaacatacaaatgaccaacaggtatacaaagcagtggtcatcatgactaagcatcagggaagtgtaaaccaataccacagtgagataccatcttaccctagttagaatggctattactaaaaagacaagcaacagatgctgggaatgatgcagagaaaaggaaactcttacacactgttggtttgaatgtaaattagcacagccattatgaaaaactgtatggagatttttttcaaaaatctaaaaatggaattaccatatgatccaacaakcccactaccaaatatttatccaaaggaaaagaaatcagtatgtcaaagacatacctgcacttggacgtttattgcagcactattcataacagcaaaggtatggggtcaacctaaatgtccatcattgaatggatggataaagaaaatttggtatgtacacacacacacacacacacacacacacacacacacacatacacagtggaatactatctagccacagaaaagaatgaaattatgtcatttgcagcaacatggatgaattaataaagtgaaaagacaaaaaaggaaagaaaaacctatcctaaaatttatatggaatcttataggatctgaataatcaaaataatcttgaaaaggaagaagaaagtatgagttatcccactttctgctatcaaaacttatttacaaagctctagtattcaaaacagagtggcataaagatagataaataaaccaagagggtagaagagagggaccagaaataatctctcatatatgttatcaagggtgccaagagcattcaatccggtaaacgacagtgtttttcaacaaatggtcgtagtggtgggggtactggatatccacgtacaaaagaataaaatttgattcttgccttataccatatgcaaaaattaaataaaaatggatccaagttctaaatgtaagacctagaactaaaaatcttttaaaagaaaacaggagaaaagcattatgacattggatttggcaatgatttcttgaataggacacccaaagcacagacaacaaaagaaaaaaaatagataaaaaaactacatcaaaattaaaaactgtgcatcaaaggaacattcaacagggtgcaaaggtgcaaaagcaacacacagaatgggtgaaaatatttgcaaatcacatatccgattggggttaatatccagaatatataaaataagtcctataactcaacagcaaaaaacaacccaattcaaaaatgggcaaaatacttgaatagatatttctttaaagaagatattcatgtccagcaagcacatgaaaagatgttcaacatgactaacattagggaaatgcaaatcaaaaccgcaatgagacagcacctcacactcattaggttggctgctattcaaaacaaacaagcaaaacaaacaaaactgagcagaaaataaaaagtgttggctagcatgtggagaaattagaacccttgttcactgttggtgggagtgtaaaatggtacagctgctatggaaaacagtatggtggttcctcaaaaaatgagaaaatgattactatgtgattcagcaagtccacttctgggtatataccccaaagaattgaaagtagggtctcgaggagatagttgaacacctatgttcatattaacattattgrcaatagctaaaaggtgaaagcaacctaaatgtccattgatggatgaatggataaacaaaatgtggcatatgcctatgatggaatattattcagccttagaaaggaaggaaattctgacacatgctacaaatatgggtgaaccttaaggacagtatgccaggtgaaattggccagtcagaaacagaaatactgtatgactctacttatatgaggtacccagagtactgaaatatagagacagaaagtagaatggtggtttccaggggctggagggaaggggaatgggcagttagtgtttaatgagtacagagtttcagttttgcaagatgatgagttctgaagatggatggtagtgctggttgcacaatattaatgtactcagtaccacttaactgtacacttaaaaataattaaggtggtgatatggtttgactgtgtccccacccaaagctcatcttaaactgtagctcccataattcccacgtgtcataggagggacctggtggaaggtaattgaatcatggggttgggtcttttccatgctgttctcatgattgtgaataagtctcatgaaatctaatggttttataaaagggagttcccctgcacacactctcttgcctgctgccatgtaagacatgacttgactcctcctttggtttccggcatgattgtgaggccttctcagccatgtggaactatgaatccactaaacctctttttctttataaattacccagtcttgggtatgcctttattagcagcgtgaaaatggaataatacaggtggtaaatttcatgttatgtgcattttaccacaattaaaaataataaaaagatgatcatgggcttctagttcaattattccatttcttctccaaattataatcttaccaaaggaaaaaaaaacaaatgagatttaaactgccaagaacaagggcaaggtgagggtctttgggccttataattgatgaatatcttgccaaagtaacattacttagagtttcaaattgctgaacgatgaccaataaatttgagaggaggagggggatgaaagagcacagtgtcagggagctagttcttctatgttttatggaaggatgttaatagattttccttcaaattaataaaattaggacaagtagtatatattttaattgagataactgtagaagaactaaaacgtatttgatcaaaagtgataatttcagcaagctaacctgggatagtagaaatagattaggaaggcctaaattttcatattgtactctttattatcatttaaagcattttttatgcacatacattgctttagttttaataattctaaaattctcacataatatagcagagtataatgagaaatataataaacaccttttttcttaatagctagatttttcaaatcataacattttaccatctgtgcttcagatatttgctaagaaacaatatattacagatacatttgaagtttctacctaataattcctctccttccccaggggaggttggtgttttttatattatatttatgatacacacacattttaaatcaatatatgtatcatatataatacaaatggtaaagcactaaatattttttccatattttaaaatttatgtaaatagcattatactttctatattctgcaattttcttttattgctcagtgttctgtttgagaggagtggttttgaggccttgaagtaaaaattatgatttattgcttttgttatttatttatggggataaataattatgtgataatataatccataagtattactgctatgtaacttgtatagataacattttataatcaaagacatttacaaactttgtatcaaaatgataattggagtcctgtttagagaacaaactaaaaaactttggcagaaaggagaagcctgttttttgagaaatgattttgtttttgctttaaattggataagtttttctggaccatagctaatgtcaattttcataataatatactggttgcataatccatttgccagtttgtcttggctgaagaagttactgaaggtgaataaaattgtaagtttttctctccttgggaacagtttctgagttattgagagaaaaggagcccaagtaccttagtgaatgggtcccggtgaccccacacaaagttgtaggagctgagctttcattagaaatagtgtttgtcccagaatattctatgcgccattttatttagtttcttctacagtcctcagaaatagacattattttctcattattcaaatgaggtaattagagcacagaggtttgcaaatcacccaaggtcacccaggtacatggtagaattgggacttaaagccagttcttttttcctccagtgttctttctattcctgccaatgcagataaacctttgaaaaaatgtaaaagtctgacttgggaaaaggaatttagtttattttactttccaatttctcagtctgattttcacaaagagagttttttgttgttgcttgtgaataggtttctatatatttttattggccctagctatgtgactcttctcaaagcctaaaaacctgaatgtattttcaaactgataatggtcacttctacccaacattatgagctttgtcaatacgttttcctcatcttctgtcatacatatgcatgcttattttattttttacatatttatttcttattttctccccccaaattcacctccctcattgtccaaattcaatacagctatggtattggcaatatctactttgccttcttatgatgtggtcatttgtatcaaatgagaaaacaaatgttgtttcaaagtatgatgagctatacaaatgaaagagatctagaaactgtatttcagtctgaagtttaatgttactctctcttatgccaggataggattaccagtgatgtcagtgaacagaaaaagagatacattttcccacagttttgttctttgaaaaactatgttttgttctctgtaaataaaggggaaagaatgattttatagataatgctttcatttgcatgtaagacagcaaaattcaacggaccaattacaatcatgcatttttattttggcaaacttttttcttgccatttaaaattcgtaaattttattgtatataacccagtaaagttgattttagaaatctctaaaagttaaaaaaaaacccaaagaatgtcactatttgcaaccacttaagatctaagtattaagcatctgtggctgctaacatcacaaaaagagagacaactagacactatgtgccttttgctgaaagatcgtaccactacctagggtcatacccaaaacagatacttgcctctgatcaatcatctggatccaacaacgaatttacaagttacatagcagccagaagatacatggaactactctatgggaattcaatcagccaaacccatatcgtgagaacatttatagaaaaacaaccttcatcaagtaaattttaaggataaaatagaagagatagagggcaagatagaagagatagagggaaaacttgcacattcaaagagatttaggtatctatcacattgaagagattataattcctcatcttgttgatgttcatgccttttgctgtctaatgttacagtacccctccaccataggaggggttacctgttctaccccttgacactgggctcagacactctcagcatttcctattattaacatcttatattagtatatggtagatttttgtgattagccaaatatttatatattattattaactaaagttcataattcactcagatttccttagtttttacctaatgtcccccctttttttgtcccagaattccatccaggaaaccacgttacatgtattcatcattttcttggactcttcttggctgtggcactttctcagactttccttgtttttgataaccttgatagttttgaggagtactggtcaggtattttgtagaacgtttcttaattgggatttgtttgacatttttctcattaaagtcagtataaggatttttgggaagaaggcctcatactatcaacatgacatcactgttgatgttgatcttgctcccctgactgaggtgatgtgggtcaggtttctccactcataagttactccccctctgcttttcctactgtactctttagaaagaaatcactatgcaaggctaacatttaaggagtagggagttatgctccctctgcttgaaggcagaatgtctatataaattctgcatgggagatttgtctgtttttccccattaatttattcaatcattgatttatattagtatggactcatagatatactttggattataattcaacactgatttattttgttgttcaaactcttccatctgatgatagtttattttgctgtgcagaagctctttagtttaattagatcccatttgtcagtttttgcttctgttgcgtttgcttttggcattttcatcatgaaatctttgcccatgcttatgtcctgaatgttattacttagattttcttctagagttttacatttaaattttgagttttacgttgaaggctttaatccaccttgagctgatttttataaatggtttaaggaagggatacagtttcaattttctgcatatggctactcatttctcccagtaccaattattaaatagggaattctttccccattgcttatttttgtcaggggttgtcaagatcagatggttgtaggtgtgtggtcttatttctgagttctctattctgatccattggtctatttgtctattcttgtaccagtaccatgctgttttggttactgtagctttgtagtatagcttgaagttgggtattgatgggtattgaagctgggtatgatgcctccagctttgttcttttgcttaggattgtcttggctattcgggctcttttttggttctgtatgaattttaaaatagttttcttctaattctgtgaagaatgccaatggtagtttcatggaaatagcattgaatgtataaattactttgggcagtatggctgttttcacaatatttgttctttctatccatgagcatggaatgtgttttccattcatttgtgtcctctctgatttctttaagcagtggcatgtagttctccttgaagaggtcctttgcttccctggttagctgtattcctaggtaaacacaatttgaattgataagagggatatcacactgactccacagaaatacaaactaccatcagagaatactataagtacctctatgtatataaactagaaaatctagaagaaatggatgaattcctggacacattcaccctcccaagactgaacaaggaagaaattgaattgctgaatagaccaataacaagttctaaaattgaggcagcactacctagtctaccaaccaataaaagcccaggatcagatggattcacagctgaattctattagaggtacaaagaagatgaggtaccatttctactgaaactattccaaaaaattgaaaggaagggaaccctccataactcattccatgaggccagcatcattctaataccaaacctggcagagatacaacaataacagcaacaacaacaaaaccttcaagccaatatccttgatgaacattgatgcaaatatcctcaattaaaaattggcaaaccaaatccagcagcatatcaaaaagttgttcatcacagtcaagttggcttcacccctgggatgcaaggttggttcaacatatgcaaatcaataaatgttattcatcacacaaacagaactaaaggcaaaaaccacatgtttttctcaatagatgcagaaaaggcctttgataaaacttaacatccctttatgttaaaaactctcaataaactaggtgttgaggaaacatacttcaaaatagtaacagccatatatgacaaacccacagccaatatcataccgaataagcaaaagctggaagcattttccttggaaactggcacaagacaaggatgccctctctcaccatttctattcaacatggtattggaagttctggccaggacaagcaggcaagagaaagaaataaagggtattcaaataggaactgtctctgtttgcagatgacataatcctatatctagaaaatcccattgtttcagccccaaagcttctaaagctgattagcaacttcagcaaagtcacagaacacaatgtcaatgtgcaaaaatcactagcattcctatacaccaacaataggcaagcagagagccaaatcctaaaagaacttcctttcacaattgctacaaaatcaataaacttaccaatttttttctctcatagattttgcttttggtgttgtgttaaaaacttatcaaactcaaggtcttgtagattttctcctgtttccttatagaaatttcacagttttacactttacacttaggtctacactctagataatttttgtaaaaggtataagacttgtatctggattaattttttcacatatggacattattttttcagcattattttataaaaaaaacttttctttctctattgaatttttttgacataactcagttgactttatttgtgtgtgtctttttctggggtctccgttctattcaattcatctatatatctattcttttgccaatacgatcctgccttgattatggtagctttgtagtaagtcctgaaattcagtagtatgtcatctaacttgttacatttctccagtattatgttggctattgtagacgttttgcccttccatatagacttcaggattagcttgctgatatctacaaaatagattcctaggaatttgattggattcccttggctctatagataaagttgggcaaaattgacatcttttttttttttttttttttttttttttgagacggagtctcgctctgtcacccaggctggagtgcagtggcgggatctcggctcactgcaagctccgcctcccgggttcacgccattctcctgcctcagcctcccgagtagctgggactacaggcgcccgccactacgcccggctaattttttgtatttttagtagagacagggtttcaccgttttagccgggatggtctcgatctcctgacctcgtgatccgcccgcctcggcctcccaaagtgctgggattacaggcgtgagccaccgcgcccggcccaaaattgacatcttgacagtattggatattccaatccatgaacataattttttttatcaatttatatattttttatattttcttttttcatcagagctttgtagttttctacttatacatattttgttagatttatccctgaatatttcttttcttttttttcctctctagttttggtgcagtggcaagtggtattgttttaaaatttcaaattccaattgttcattgatggtacgtaggaaagcaatttacttttaaatactgaccgtgtatcctggatccatttatttccaaatatatttagatttctctttagatttctttcatgactcatggcttattctaaagtatgctgtttaattctcaaatatctagggattttccagctatttttctgttattgatttctagcttaattccattgtggtctaaaaacatactttgtatgatttttattcttttacctatgttaatatgtgttttatggctcatgatgtagtctgtcttggtgaatgttctgagttttagaagattatgcattttgctgttattggatggaatattctataaatatcaattagatcaagttgattgataatgattgataattcagataatctatggtcttattgattttctctctacttttcctactaattactgaatagaagtgttgaagtctctaactataatggagtatttgtctaattatcctttcagttctttcagtttttgcctcacatgttttgatgctctgttgttaggtgaatatatcttcacaaagatattggagaactgactcctttatcattatgcagtgctcctttttactcctgcttattttatttgttttgaaatttgctttgtctgaccttaatatagctgccccagctttctattgatatatgtcagcattgtatattcttcttcatccctttacttttaatctgagtcttttaaaatttaaagtggactgcttatagacaacatagattgtatcttaatttcttatcaactctgaaaatctcttttatttggtgtatttagaccagtttgttacacttaaagtgatggttatttatatatttagacttacaggtaccgtgcttataaatgttttctatctgttgcatttattctttgtttcttctttcccctctttttctgccttctgtgtttttaactgggcattttatatgattccattttatcccttctcttagcatatcaattatacttttaaagagttcgagattgctctagagtttacaatatatgttttaactaatataagtctaacttcacataacagtatgccacttcatgtagactatagttgctttataatagaatattattccccattcttccctcctgcccatttcactgatctatatgctgaaattacttattatattgctatcattaaacagtcatctattagtccacttaagtataagaaaaataaaatattttgttttaccttaatttattctctcatttctctctctttccttgtagatccatgtttctgaaccacatgattctccttctgcctgaagaacttctttaaacttttcttactgtgtctgcaggtgatgaattacctcagtttttgtttgtcttataaagtgtttatttctctcctaattttgaagggtcattttgctagatatacaattctaagttggtggattctttttctttcaacactttaaatattcactccattcttttcattcaattcttttcttgcttgcatggtttctgagaagtccactgtaattcttatttttgttcctctacaggtaatatgttttttcctctggttacttttaaggttttctctgtttttggttttctgaagtttgaatatgataggtgcaggggtggttttttgaaggtgggggtgagggttgctatattagtccattttcacgctgctgataaagacatacctgagactgggcattttacaaaagaaagaggctcaaatggacttccagtttcacatggctggggaagcctcacaatcaagtgaaaggccaggaggagcaagtcacgtcttacatggatggcagcaggcaaagagagagcttatgcaggaaaactcccccttataataaccatcatatcttgtgagacttactatcatgagaacagcatgggaaagacctgcctccatgattcaattacctactaccaggtccctctcagagcatgtgggaattcaagatgaaatttgggtggggacacagccaaaccatatcagttacttatactatttggtgttctctgagctttctgggtctgtttcagtttctgtcattatttttggaaagttttcagccattattacatctaatatttcttctgcttcattttttccttcttctactgatgttacaccttttgaaattgtcccacagttcttggacgtcctgttttgttgggttcatttccctctttcttttttttctctttgcagttcagtttgagaagtttctattgccttatcatcaagctcactgattttttccttggctatgttcagcctactgatgacctcatcaagggaatcctttacttctattactatgtttttgatttctaacacctccttttgagtctttcttagagtttccacctatcttcttacattacgcatttttatatgttgtctatctttttctgttagagcccttaacatactaatcatagttattttaaattccccatctgataattccaacatctgtgtcacatctgagtctgactctgatgattggtttgtcttttcggactgtttttcttgtcttttggtattcctcatagcattgtattgaaagctagacattgtattgtatactaggggctgagataatatgtttttagtgagaaaatttatgttaatatgggtttaatatttgttgtagctatagctgccacagatttcagaaccattcagtgtccttgtttttgcctctatccttgagggattcctaaattctcttcttcagagaaagtcagtgtcttgtagctcttttgtatgtaatcaattattattatactggagctcgatggtttggtagtaaaaggtggggaggaatagcagtctatatataatgttaaaattacatctcagtgttttggtgaaggggaatggtctgtaccttttggctatgaccatcaacactgtcttcccagtggtacagctttttttttcttttctttctgctccctcctccctttcttggatgcagtcttcctagtccatttcgttgaagccctggctcctgttgattatttttttatctgaggtgagacaggaaagctagaagggcttggaatgggtggaatgaccgtccctcatgtaacataacctcaaaaaatgcctcttctcttaaatagtaggcctttattttaaagaaggctcaaagattacaattattcctctttccctctcccttcggaggcatgatgggatgattatctgttgggtttcctggagataaagctcctgaaaatttaggggtctgcctcagacctcagccatcaaggagtttctcatgctcatgttagttcacgctcagtctccagcaattcaccaaaataattacttaagtgttcctaccggatgatggctcaagaagcttaagtttcaggtaagcagatcttagctgtgcctctctgtaaatgcctgtctctctggatttgggggtattgatttatgctgaaacttcaatttccttatgggtccaagaaaagtcattgatttacaaatttttcttgctgtagacagaagtgataatatccaagccctttacatgcagctgaacctggaagtttctttgttttaaagttcttcatacaggtttcacacatgatttgctaagtttattcctatatacttactctccttgttgatattgcaaatgaggttttctctaccattataatctttaacaggtttgctcctttaaataaggttgctgatttcaccatattatttttatattctgcaacttcattgaattatttcatgggtaacgcttcttgtatcattgattctctaaagttttttaggcatactattaggtttgtgcaaaagtaaatgtggtttttactgttacttttaattggaaaaactgcaattacttttgcaccaaccaaatattattgcgagtagcaataattttactccttctttaccaattcttatacctttaattggtttctcttctttaattgcataggtaatacctctgatacaatggtgtatagtcataaggatggtggtcatccttgtcttgtttataatcttaatgaaaatggttctgatattttcccatttagtaagatattggcttaggatatctatctatctatcttatcatgctaagaaagaaattttaagtttcttttttttttagtgttttcaccaggaatcagtattgaatttcatcagaggatttttcattatctatggagatacataattttttttcttagatttaataatgtggattataataccaatrggttatctaatattggaccaactttgcattctgaaagaaattccacttagttgtgttgtattgatttcacaatgtataagattctgtttgctaatgttttagttggtatttttacatcaatatccataaacatactgctctgtaggtttttttttgtatttttaaaaatttagatttaggtattagtgtagtacttgcttcttaaaaattgggaactttttattcatctttaatgttctgcagcactctataaaacattggaaatatcaaatctttgatgattcggtagaatttttttccaaagttatctgggcaaggtgctttttkgttgatgtttttcttaataacttactttttatcttctatggaaaatgttgtctatctataactgagtcaaatatcatttattttattgccctaagaaattatccatttcctctgttttcaaacctatttgcatagaggtctgcaaaatagtcacgatattttaaatttttgtttcagtggttgtttccccttgtcatcttctatttttttattttataatttctcctctattttattaatttcttcaaacttacaggaatttgatttcaatggcaaaagatttatatcaaatcttaagagaaaccagagtataggaattcgattaataagtctactgtttttctatttttaattgattaatttctacttttatctaattttatgcttctttgtgctttctttttacttttttattgttttttgagctgggtttttaatttcttaatttcgttaaaaatttttaaatcagaaatatttagtttatttagttctgtgacttttcctctaaatactaatttcaatacatctttccattattatttttcagaaattttgtcatgtaagtttgtattttccctttaggtagaatgttttctaataaacattttttcttaaaatttgcgtggaagagtctttttgctctttaattctgttarcaatttctagtttttattgcattatgatatttattgttgtgatatttctactttttgaaacttactgatattttctttgtgacttaatatttgattatgttttgtaaatgttttattgcacttgagaagaggtgtattatttactgtatggctgtaagtttggtatatgcttataaagtttggtatatggttataaaatctaccctgttttacatgttgtctagatcttacaactctttagtattaagttgtgacttttagcattttcgttatatttaatttttttggattgaattctagtttggctgatagcagattacatttcctgatttcttattgtttccattgactttaatgttttgttcatctcttaattttagattttctgattcaccttgttttatgtatgttttttgtatgtagcatatagttacatcttgctctgtgtaccaaactgaaaatcctttccttttattaatagtttagcccatttttttacatttatatttagcccatttatatttatattgatatggttgcaatttttattttacactctgacacaatagtttatagttatgtatattttaagttatttgctatgtttctctttctccctctgcatgatgtgtcttttttgccttttaatatttttctaggtatgcttttgtttaccacaaaagtggccagcagggtaagaccatgagaaaacatgcatggggatttggtgtttattctttttgttacttacagttatcatgaagtttgggtattctctatgttcagcttatgctgagggcataatttgcatagtttcatttttcttattatttctctttattgcttttagttgtagacaggaacccagacagttgctatcttcctccatgacctagaattctggcttctagaaatcataagaatatttcccactgtagtctgacatgccaaatgtagctgtagcagtaattaaattggtggggggattttagtaattcggttgacagcttttgggaaatgacattggctggattaaagaccataggaaacccagaaagtttttatgctgctatactagtaaaactgccattaatgtggactgttcaaaatgctgaaagacatatggaacctcaactttctacaggcaagaagcaggctgagaaagtcgttcaaagggtatattttttcatgttctcttcaaaaatggccaaatagggtgatggaaaaagaagaattccaagaacatggagccaagggctgtggaaaacaactgactgaggagccactcccaggaagccaaactggggcattatcagaaaatattattcatcctaaaaatagacccgccatccagtgggattgtagaattgctatgtaccagtgagtacaatgtgcctcctctctttccctgtgtgaatggcagtgtttattgtgactattttgcctgatttcgcctgatttcaccactatatgatgattcgtcttttaattcataggcctctagatggggacgacccatatctatacttgtggtggagagtgtgttgttctgcctagatacccctcaggaatgaaggacttatgttctcatctgctgggagtgctcgtgaaagatagtccttagttgtcatccctcctttgggcttttccaatggcttatttcccaaggtcatatattcttacagggactgctctgattcacgttgggcatgaagttccagccctttatacccaaaattatgaggggccactctaagctgtagaatttcttttgggttacctggggctatcttggaactgaatcacagatcaacatctccatctgtctgatccttcttttactgttttctacaagtgtttgtctcaagagtactcccaaataattatagggcgtgctaatttctttctcaggttatacgttccaggaaacctaatctgcatcaagtcctgatatatgtctaccacaagttgctgaattttaaacttgatgctctgtgggatgagatgttttagggagtcttgtgagtgtcaccactcactaaatatatctcagcatgtatgtgggaatgaataattgtagtcatgagtaaagactatggtagatggtaaagatggctccattttttcactgctccctatattcatgtcttttgccatcttactttgcagtgttcctccattctgacacagtacatggccacgtaacttgctttttcctaggaggaagtagaagtggcagtgtgctaatacaaacctaagcctcagaatgtcttatatatttgctttttgttgttggctttagtttttttttggctgtttcatttctgcacttcagcctgctgggaactgggaaatagaaggaatatagccaagccatcaagatcatccaagctgaggccagcatcaaggagctggaagcctataaatgcagatatatgagcgagctctgctaacatcagtagtgctcccaactgactactccagacgtcgttagaacttactgctgtgtactactgtagttcattttgtggttgtttgttatgcagcattattatagtaatagagatgggatacaagggaagaaaaaactatgatgtgtgtggatgcccccttggtctataaaggtataaagatacctaggtgagtaaggtaaagatcagagtgtcagtaatattgaggagagaggaggactgtgtctggaacaaggcttatgaagagcggctcaagtggctgaaaaagttatatttcttaaactgggttgtgtttagaagggtggtaatcattcatttagctacacatttttaaatgtagattttctctacttattgtattttatggtgaaaaggttaaaataattttttaaaattacacaattcaaggctttaactttatagcaagagaaatatatatcctagagaggttaagaggaacaaatggaagttagcagcaggacaaggattagcatccagaccaaacattatgtgaataaatgagaaaaataatatcaataaaaggaagtgatattttcatagagaaggacacagaattggacgtagtggctgatatttgtaatctcagcagtttgggaggttgaggtgggaggatcacttgaggccaagagtttgagactagccygggccacatagtgagaccctgtctctacaaaaaaaatttttaaaaatagctgggtgtggtggcatacaactctagtcttagctacttgggtggctaagacatgaggattgcttgaacacaggaatttgaggttgtagtaggctgtgatcgtgccactgcacttcagcctgggcaacagaacaatatcttacatctacagaaagagagagagggaaggacagaaataatgagctatggaaaattgcacactaaaggtgttaaaatgtttttttatcaggggaggatacgaaatctttttctgaagttttcaagaaaatcatatttttgaaatgataaaatgtatccctgtcaagaggtgagagtttctattaggaaatggttgttaagcatcacaattccgtgtctccctatctaaacactttctatacccaccaagaagatagattcacatgatccatgtatgcaaaatcttattgacagaaatggactttgacctaggaaattttccatcctctctacccaggcttccagggacaccatgaatgattcttttagccttagatgatgtattcagaaccccctcttttacattataaatacatggctcacgttagaaaaattcttgtagtaagcataggttctaccagaacatgtatatcttatttgctaactgcaaattgtactctagacagttattaccagtggtgttctcaagtctgtctagtgaacgcctcaaatacattttattgacaaatgtcagaagttactgcacaaaattgtaaagccgtttggttctgcaatctgtaagattattcttcagtagaatcaaatattttacttaaattctcccctaccttctattacctttccatatatttttatattttgttagtatcagggttgaatgatatcaaacaggagtatctactaaaattattagtgattctaaataattagtgtgaatatgcaaattcagaaggttcagttggtatttttacagtttaccatgactcaggttaaacatcaacaggtgtggactcttagagtctatgtacctggtccatttgccctaggttaaaatgaaggaaacaactgatacccccaaaatgtggaaggacttgcccaagcttgttaggtgttcatccagacctggaaagaatctaccttatgataggccagtcctcttttcaatgtactagtcaggctctcattaactttgacagagaagatgagaaaatttatctttaccattaaaatggtgtcttaataaaaacggtgtgtttccagaatttctcttaggggaggtttggggagagaatatggcaatggaggtggcttaggtgcttgttttgaaattgcacttaaaagtaagataaggtttttacttagattgggggtggggtggggtggagtagcaaaatacctcttggcttctgcactgattaagactaattattattattattattgttacagggtcttactctgtttcccaggctgagtgcagtggcacaatcagggctcactgcagcctcaaactccccggctcaagcaattcttctgcctcaaccacctgagtagctgggactacaggtgtacaccaacacacccagctaatatttttattttttttgcagagacaaggtctcactatgttgtccaggctggtctcgaactcccagactcaagcagtcctcctgcctcagcctcccaaagtgctgggattataggcatgagtcaccatgcccaaccaagactrattatttttggaacctgttttaagatgtgttggcattctcaatcaggtttagaatagttgtatagactatacacgaagattcaaaacatttcttaaaatattctatttttagccagtttgcatttaagtactttaaaaagggggcatttcatcagagacaatgctaggtatatttaccttactatatccatggctctatgttttctaacactgtgtaatttactcttttctaatagtatagaaggaggctatgactcttaagtaggcagtttgagaaaagaaaatatctaaaagctgctctttagggataaactgataataacaacaaagtgttattaaagaaactcaaagaagttacatatacacctgctttttttttctttttcttttctttcttttttctttctttcttttttttttttattttttttttatttgagatggagtctcgctctgttgccaggctggaatggaatgcagtggtgggatcttggctcactgcaacctctgccttccgggttcaagcaattctccagcctcagcctcctcctgagtagctgggattagaggcgcatgccaccacgcccagataatttttgtatttttagtagagacagcgtttcaccatgttggccaggctggtcttgtactcctgacttcgtgatccgcctgccttggcctcccaaagtgttgggattacaggcgtgagccaccgcacccggccccatatacacttgttttaaatcaacatttctctgtgtggataagataaaaattcaatgtgtattctctgtgaagcacacaaaaggacaagtcttcaatttaaaggatctaatagccttcgagtctcttgagaatctagattaatagaggttactcagaaaattgcagaacataggaaatccagctagtgaacctgtaacacttggatccaaaagctaaaatcctctcatgaggaaaagcaaacaaagacaaatatccacagatgtaataaaatacccatgacataagtatttcctgttgtgtttttggcttcacaaatacagtatgggtttatatatctatcaattatatcaacttaaagtgtagattatggaaaaacctacatttattatcaccatccaacagttcccatatttcctcatgatcctgttacctataagcatcaaaatgcaaagctggcttccacctgtggaaagtcgtccctgagagtcattattttccttttaacattgacatcatacactttgacctaaattaggaattaaaacactatcagagcaatcgttaaaattttataaggtaaacttcagttctttcttcggaggatcagaaatactcatgtagcctccatctaaggaatccaaggtgcaggaagcggaatgacgtaccagacatgacacagcaataagtggaagggttttgatgaggatcagtgcttctctgagtaaggtgaggctgaagaattgaggagtctctgccagccccaattaactcacttctttgaattctactgatggagattgttctgggaatatctgagataaaatttatctttgcaataactgttatttttaaggaaaatttcatgaacgaactaacagcaagtacaagattttggagactaacataatgggtgattattatggctacttaagctaacaaacttttaagatagaacaactattttgcatataaatattaaatcaagtgttttccattcaattcctaatgaggaagctttcctactggccatagcggatacctaacatcacttactagctgtttctttgttactgaacatggcaggagggggcatgggggggtgtcatgggactgcctactttcagaaagttcagctttttgtatttcatataacagcaaaagtttacaggacttggaagttcatatagtatttatattgtgccaagtagagctcttaacaagcaattactgtatacaaacaccttcattaaaaaaatgagaattttagatgacagtcatgtgtatcatttcttaaagataacctacaaggagtcaaaggagtttctctgtttggccaacacagaacagctgatgaataaatatattcataaggagaaactggctgaaaaataaaataccagtgctttgtaaaagcaatgatggaggtgagcaaatcctaatcttaaatgagacataaaaaggaccgcacgtcaattcaattgtttaattagagataattctcagaagaaaaggggttaattttttcaaaataaatgattcaatttatgataagccctagaggctttatgctaattacaagttattttaagacttgcggttgtaagcacagtttatggttacctctgtgagagctgtttggatcatgagagctctactttatgccttgttttagctgcttgaaatgagattttgttgttgtgcaggaacactaatataaaaagcagaatttgtgtgttttgttggtacgcatagatcataactgtgggccatgaggaatgtgcagctgttctttcattgcactaggaaggaaaatgttttgctgtgttacaagtctgtgtgcttataccttcctgacttgctcctttcagaataatttccccagagtcaaatcccaggcaagtgcagcctttacatattgagatgggcataaatgctagctcgaggctttttctgaagttgtgaaaggttgacagtactttactggttggctcaagtaagaaattatggaggttttcatgtcagaacagctgcacttacattttccatccaaaacacttaccaatttactcaaaattaggagataattgaaaagcagtttcataacattctggctttctaaaagaaaataaaattgttttaaaacatgcaaattatattgttaattgctgagtgtttttttctctcatagtagcggttgtgcattctgtctatgcctgcttggatatttatgttgagtaactacatttgttttgttttcagttataaaatgttcttttacttgagtaagagcaaattcttcccttatttatttttccagagatgtcatgctcattatgtatgcatttgggtgtaactacaacaaaacaaaatggattttcataaataaaatttacatagctgaaaagagcacattttatctccaagataagcattgccatcttttttctgattgttgctctgtaattcttctgaacaacaaaatgaaaataagtcaaaatgagaaatcaattctgtctctttataaaatgtcaaatatgtatgtcaaattccctaagaactgtaaatggctcttagtatttttaaaaatcctagatgtaattacattaagtaatttggtttccaaaggagtttgaataattaaaaagcacttgctgattttcttcagtagactaaaaagtattttaataatgcacaaatagcagaaattgaaaaaagacttaaatagaaggatcattttaactaaccaatttatgaattttgaaatttcaagcttatggtgtttataccaagacatgctacctattagttacaggcagatgacattagtgagaaatcagttatatgttaggcttttaaaatttaactcaattctaaaagctttcctctctctttacatggctgttccataaccatatgggagacatgaactccagttgactctggattacctacggaattggggtgagggttagtatggataaatgaaatccacagataatcttaagacattttagctttcatctccccaatctcccctgcctccaaattatttcagccgctgagatgcagcaaaatgtaatatgtccttgttttatttttttctcttatgtttcctagttttctcgattactttaacagaagtttagggaaaactgagtggtccgtgtgtaggcatgaggcaaaaggcattgaatttagatcctcatccttaaataggcatgactgtatgagccatgctgttttcttgcaaaccattttttttcttgcccctgacaaattgtaacctgctttctctggtgaaagcagttctgacccttttccatccctaataactgcttggaacctgactaagataaagggtcctgctgctgcagacgccagcttacagggcacaatcagggctagcattgattggcaatggttcattacccatggggacagctgccctgtttatcatcctaatcttttttggacccaatgttttttgttttttcacccactctgtggtagagctgaggctggaggaggctgtgcttgggttcatcttaccagctggaaagaatgaaaacgtgaccaaacacctgaaaaattgccacctggccacacaatgactttaatgagactggctctcatctccttctgggactgcaatcacaacaagacaatgtttgttagtttttaatgcaataatcagttcttttgaaggaaagcactctatgtagggttaggggtggctgggtggctaaaaacaaactgtgttttttaaaaaaaacatcaactgctgctaaaaaccaatgtgttcattgttttttaaagtcaggactatcatgtaagtagacattgcttttatttcttttgaaaaagaagaggctgattcaaatcaagaatctctcagtttatttctttgtaataatttatacatttataaattcaatcatttctgtattcttcctgtgaagaattattataatttatctggctctagagaaaaataaggacttgggtatccaagatttaaaccttcagtatctaaacaccaggaggtgctctaagataacatgaaacaacacatttccccgagatttacggattctagttacatgaaatttactgacaaaactgtttgctctgagaggccctaaacgttcagattctaaggtatgcagtgtagtagaccatcttctggatctaaaggactctttcaagggagaacagtagccctgtcaagatttcggggacattagtaaaaatttgcagagagatgttttctacatgcctatgacctggaactatctgtggaagatggtaaacaaagaatgttaatactragtttgttttgtgttacacagtttaaaatgcggtgagaaagccaggtgagactatgaaattttggagctggtgtattacattgtgcatggataagtactgtatttgctcttccaaaccagagatcaggtgaaattatgaagacaaccttttcaggtattatatagggagaaattaaagagaaatttatttgtgtttttatggataatcaataggatcctatcctggggaaagcattctaataagtaatttaaaaaaataagcttcattgagttacaatttacatacaagaaaattaatacaatgaattttacagttagaaatgcataatttgatgaattttggcagatgtggatagtcatgtaagtaccacaaaagtcatgatatagaacatttctatcatccaaaaagagttctttcatgttccacrtcaattaatgtcattgctccacaccttggaccctggtaactaatgatttgttttctattgctataattttgccttttctggaattttatattcatttttttttgtggccagctttttaaacttttcatactgcttttgagattcacctatgttgtatgtattaatagctgatttctttttatgacagagtagtattccattgtatggatgcattgtaatgttattatacattcacaacttgatgaatattgagtttttttccaattttttggtattatgaataaagctgcaatgaagatctgcatgcaagtctttgtatagacaagtgcttttccttttctcttgggaaaatacttgggaatgggatggctagaacatatagtgggtatatttttaactttttcaagatactcttataatatttttcagagcatttgtactgtcttacattaccgccagtagattataaaacttccaaattctctgcacctcaccaacacttggtatggtcagtctttttaattttagccattcatagtggttgtaacttgcatttacctaaagatacactgagaatcttttgtatgtgtttgttttacatgcatacattttctttaaaggagtttcattcaaatattttgccaaattttaattgggctgtgttttcatattattgaaatttggggattctttatatatcagagtacaaatgctttatccaatgtaggctttgcaaatattttcttctagttcatggcttgtcttctaattcattcttttcaaacaacaaaagtttttagttttgatgacatcttctttatcattgtctttaatggatcatgctttctgtgttgttgctaagaaatcttggcctgatccaaggttacataggttttctccaaagttttgatctaaaggttttataatttcagtttttactttaagcctgttatttgtgttaatgttatatatggtgtaagataggattaaaactcatttttttcatattaatttcaaatgttttcagcatcacttgttaaaaaagattatagtttcctcactgaattgcttttgcacatttgtaaaaaaaccagttgtccatatgtgtgtgcatttatttctggacactgcagttaatctaatgacctatttctcccatccaaatattagctaggcctgactctgcttagcttctgagatcacatgagagcaagtacatttagggtggtatggttggagactattgacctatttctttatctttataccagtaccactctgtcttaattcctgtagcctgggccaactacataatttttgggatctagtataaaataaaaatatgggttcctttgttaaaagttaagaatgtcaagacagagacaaagagcattcaaccaagcacagagctcttctgacagtgggaccttgtgcaactacacaggctacatgcccatgaagccagccctgatcacagcattataatatgtcttgaaataaaaatcaggcagagttagcatttccactttattcttccttttcaaagttacgttgactagtccaggatttttgtatttccatatgaattttagagctagtctattttttttttaaaacaaaccagtggaatttttattaggattgcagtaaatgtatagatcaacttgagggggatagatttctttgcaatattgtgtcatcagaccaatttagggctatgtgagttatttatcttttttattattattaagttgtagggtacatgtgcacaccgtgcaggtttgttacatatgtatacatgtgccattttggtgtgctgcacacattaactcatcatttacattaggtatatctcctaatgctatccctccccgctccccccaccccatgacaggccccggtgtgtgaagttccccttcctgtgtcaaagtgttctcattgttcaattcccacctatgagtgagaacatgtggtgtttggttttttgtccttgtgatagtttgctgagaatgatggtttccagcttcatccatgtccctacaaaggacatgaactcatccttttttatggctgcatagtattccatggtatatatgtgccacattttcttaatccagtctatctttaatgaacatttgggttggttccaagtctttgctattgtgaatagtgccacaatgaacatatttatcttttttgagtgagttttgtagttggtgtctattgaggaactgggccatgtcatcaatgttgtcaaatttcttggcataaagttgtgtccttccttattcttttttcatatatgtagcatctctgttaatagcacatctgtcattactgatattggtgatttgtatcttctcttttcttgatgaatttgactagagttttattaatgttattgattttctcatagaatcatttttggtttcatgatttttaaaatttaattgatttctgctcttatttcctacttactttttacttaattttctcttcttttcttagtttcctaaagtggaaactttcagatttgaaccctttcttattttctaatatggatgtttagtgttacagtttctccactagttattgtgttagtggcatctacaaatattgatgtattatgtctgtatttatatttcattaaaacggtttctaatttttaaatttcttctttaatctatgggttatttagaagttgttatttagtctctaaatatttcaggattttccaaaggtttttcccttatttatttctaatttaattctattgtggtcagaaaacatttgtataacttaaattcttttcatcttatggggatttgttttatcacgaagactctggtttattttggtaaatattccatatacatttgagaagaatgtacattctgctgttcttgtgtggagtgttttatcaattccatcttgggcaagctggttaatgtaggtcaatgttgtcgaaaacttttatgtcttcactgatataccagctacttttcaacccacttttgagagaagggtactgaaatatccaactgtaattatgggtttgtctgctccttataattctatcagttttttccttatatattttgaagttgtgttgttaaatgcaaaaactttagaattgttatgtctcctgatatatgttgaattcattaacaatatgtgatgacttcctctattgtcaataatattcttggctctaaaatataccttgtcttatattcattctggtttttctttgatttgtattagaatggtatatattttttccatcactttacttttaacctgcacacaagcatttaaaatgtgtttcctgtgggctgcatatagttgtgccttgtttttaaatccaatttgacttagacactattttcatctagaaataaatttgacaatttattttaattgaggatgtttagaccatttacatttaatgtgattattgatacagttaagtttcagtcttttttcttgtcatttgttttctggtcctctgtactttgtttaccctttgcaaatttcctgtcttctttgggatttaacatttcttatgattttatttcattttctttgcaagtttactagctcttactttttgtttgttttattgttttagtggttgctttagagtttattttatacatattcaagttatcacagtctaccttcaagtggtattatatcacttaatgtgtagtacaagaaccttacaatagtattatttctatttctttccttttattctttatattattgatgtcatgtattttattatacatatgttataggtattataattcattgttattatttttgtctaaatagtaaattatcttttttttttttaattttgagacagagtctcactgtgttgcccaggctggggtgcagtgacacgatcttggctcactacacacctggcctcccaggttcagacgattcttgtgcctcagcctctccagtagctgggattataggcatacaccaccacacctggttaatttttatatttttattagagatggggttttgccgtgttggccaggctggtctcaaactcctggtttcaagtgatctgcctgctttggcctcccaaagtgctgcaattacaggcgtcactgcgcctggccagtcgattatcttttaaatatatttaaatgaggaaaatatctcatacatttacccagacagttaccatttcaaatgttctttctttaaaatagattcatatttccatctggcattattttccttttgcctaaaggacttcctttaatttaaggaatgtttaaatatgtttaacatatctgtactgtgggtttgctggtgataaattttctgtgtttttgtgtgtctaaaaaaatcattatttgtctttatttttaaaatttattttttctgtgtatagaattctaggttggcaatttgatgtttattcattcagtactttaccagcacttcactgacattatttactataagaaatttgctattattattatctttgttcctatttatgtatcatgctattttattctgatgtgttaagattttctctttattattagttttcataaatttaattatgatgtgccttcgtgtagttttcttcatgttttttgtccttatagccactgagcttcttgaatctgtggaattataattttcattaagttcagaaaaattttagcctttttttttgtatcgtgccctttttctttacccttttggagaattcaattacctatatatgagctatttgaagttgtcccacaggataatactattctttttattcatttctttctctatgtctttcattttagatagtttctactgtgatgtatttaagttcattaatcttttcttctgcactgtcaaatttgttgtgaatcccaatgaatattgattttatcttagacactattttcatctagaaattttattggtattatttttatatcttccatagctttgactgttagtatagttgatagagttatattatctgttttaatgtttttgtctgttaattctaacatctgggtgagtttgggtctgattttgatttttcttatcatcatggctcatattttcctgcctctttgcatgactggccatctttgactggatgcttgaaattgtaattttatattactgggtgctagatatttttatatttctatcaatatttttgagctttgtttttggattcaggtaagtcgcttagaaacagatctttttgcatcttgcttttcagatgtgtaatgcaggagcagtacagcagtttagtctagagttacttatttctgaccaatgaggcaaagtccttctgtgaactctacttaatgcccctgaattatgagattttcaagtcaggctggtgccaacaagaaatattccaagaactgtgtacatgccagatttccgctaattgttttgaatggctttctggactcagatggtttcctcacatgcatgtactgatcagtactcaagggagactctctgcagacctctgggatctctttctgctcaacattttcttctccagaactcttccctgcaaaatctagctaccttaagcatccttagatttttagttccacttctactcagggagtccactgggctttgcatgggttgtccctctctgttctgtggtctggaaattcttttgaggcaatatatctggaacaatcgtatggcttacttagtcggtttcttgtttctttcgcattgctgtccttcattgcctgatgttcagtgtcttgaaagccattgtaacgtatattcttgtctgttttcttttgtttcttgttatttcagctgggaggttaaatctggccccttcttaactagaaatagaagcaattcccatactctttttaattttttgatattatttatcagactttgggtttgtttagatatctgtctattttctctctcactggagatcaggtactctgttgtgttcacattttttgaacattagtgaatgaataaatgaatgaagtatatgatctaaaatgacaatgaacatagaaatcttgaaactttctgtaatcacctaccaagttatcttgccttataattgttttatgttgataatcagtggctcttttctaaagaatttgcaacattttattgataattgcccactgtttctagtggtaagaaaagagtcctttctcctcagtttgcagaagaaaaagtagagcatttaaaacttttttagagtgtcaagcaaaggttgtttgcattataaaatcaatgaaaatactgaagcttttcatctctgaaaaatattgaatatgtaaattagggcacaaattttagtttgctcttaggtagtttgatgataattatgagagttatattatttaaatctaagctcttgagagttctttcttttttatatttctaagagagcccaaccttatgttaatgtacaaattctttttgagtattagtgaatcaatagttttcacaaattatctaactcctcattatcctcactttccagtatgagaaatctcatttaatttaagataagataatatctgttactgtaataattcagttctgacaaattttaattttattttaaaatactggcagaaggtaaaatctcaaatatgaaattctccttttgactttatctatctatttatcttttggaactcatggttttccacttgcttttttccattaacatatcttgaagattttttctctattagcttttataattttacctttttcttttaattgctgcagaatatttctcatgtacatgtattataatttacataatcaatcttccattgaagttttaaatggaattctttgtgcaactaagaatattactatcaaccacacctttttatgtttgatatgaaacatctgtgaaccttttaggatttgtatttaatttaatgaattttctggaatttttggaccattccattggggacatttagataatttctggccaagataaagtgtgactgctttgaaaagtctacaaaagcaacctttacaaaagcttctcttggcaaagcacagcctagaaccaagccaatagcatttttcagcttcactgcattcatggcttttgaggccatgaggtgtcagtatcctttctgtagatgtttcagaagaatgcctcaattcatatttcacttgtgggattttgtagtttggcataaatgaacactacaaataggttctagtttggtgaccatatattacaaaaatggttggattcatatttatgtatattcgtgaatttcaggttttttgaaattgatatccagcctgtgaaatcaggtgtaatgttttcaaaagtaaaatttagtattactaacacgtttcaaatactattttataatacacttgtttattagtctgttctcatattgctatataggactgcctgagactgggcaatttataaagtaaaaaggtttaattgactaataattccacatggctagggaggcctcagaaaacttacagttatggcagaatgggaagaaaacacatccttcttcacatgatgacaggaaagagaagaatgagagccaagcgaaggggaaagccccttacaaaaccatcagatcttgtgaaagcttcctatcatgagaatagcatggggaaaaacacacccatgattaaattacctccacctggtccctcccatgacatgtggggattatggaaaccacaattcaagataagatttgggtggaggcaaaaacaaatcatatcattccatccctggcccctcccaaatctcatgtcctcacaattcaaaacacaatcatgcctttccaatagtcccccaaagtgttaacaaattccagcataactcaaaagccaagtccaaagtctcatctgagacaaggtaagttccttctacctatgaacctgtaaaatcaaatgcaagttagttacttcctagattcaatgagggtacaggcattgggtaaatatacccattccaaatgggagaagttggtcaaaacaaaggggctgcaggccccaataggacagtcattaaatcttaaatttccaaaatcatctcctttgactccatgtctcacatccagggcactctgatgcaagaggtggtggccttgggcagctccacccctgtggctttgcagggtacagcccccttcctggctgctttcatgggctggccttgagcgtggcattgccaggtgcatggtccaagctgtcagtggcagtaccattctggggtttggaggatggtggccctcctctcacatctccactaggcagtgccccagtgggactctgtgtgtggactctgactccacatttctcttccacactgctctagcagaggttcttcatgaaggctccacccctgcagcaaacttctgcctggacatccaggcatttacatatatcctctgaaatcaagatggaggttttccaacctcaattcttgacttctttgcactagcaggctcaacaccacatggaagctgtcaaagcttggggcttgtaccctccgaagccaaaacctgagctgtaccttgaccccttttagttactgctggagtggctgggatgcagcgcaccaagtcaataggctgcacacagcaggggggtcctggacctgctatcaggaagccattttttcctcctaggccttcaggcctgtgatgggaggggccaccgtaaaggtctctgacatgccctggagacatattctccattgtcttggtgattaatatgtagcttcttgttacttatgtaaacttctgcagcaggcttgaatttctccccagaagatggggtttccttttctattgcatcatcaggctgcaaattttccaaacttttatgctctgcttcttcttgaatgctttgctgcttagaaatttcttccacaagataccctaaatcatctctctcaagttcaaagctccacagatctctagggcaggggcaaaatgccaccagtgtctttgctaaagcataacaagagtcactgttactccagttcccgacaaattcctcatctcagtctgaaaccatctcagcatgaacttcattgcccttattactatcagcattttggtcaaagccattcaatacatgtctaggaagttccaaactttcccacatctttctgtcttctgagccctccaagtctctaggaagttccaaactttcccacattttcctgtcttctgagccctccaaagtgttctaaactctgcctgttacccagttccgaactcactcccacatttttgggtatacttatagcactccactcctggtaccaatttactgtattagtccattctcacactgctataaagtactgactgagatggtaatttataaaggctaaagatctaatttaatcacagttcagcatggctggagaggcctcaggaaacttacaatcatggtggaaggggaagcaaacatgtctttcttgacatgatggcagaaaggagaagaatgagagctgagccaaggaggaaggccattagaaaaccatcagatatcatgagaacttattcactatcatgagaatgccatgtggggaaccacccccatgattcaattacctccacctggtccctaccgtgacatatgggcattatggaaactacaattcaagatgagatttgggtggggacacagccacaccatataagcttgatcaaataaacttttttcaaaaaaaaaaagaagaacagaagatcattttgaaaataacaaaaatgtgccacacatttaatactttttcttctaaaagctttagatgcttccttagatatcatcaaattatatgtcactgcagtcctggaagaaagatcagtgataggaattgtaggcatttatgggcttcatggttttgtccaagataaaaagaggaacccctatttattgctcacatcctttagaaaagtaacttaccatacattgtctcttgttagcctcagaacatcaacgtaagggaggtattattagccctgaggttcaatgacattaagagtttaaacaaagccatacacctagaaagtgaaagtgagggtttgaactcaggtctttcttttttcaaatcttgtgctttttcctccaaaaggaatattttttttccactatagaatacattttttgtgtatgtgcacatgcatacatgtgtgtatggagagttgctccagaattctcatacatttctatatcctaatgtaaagggaaaaaaaatccacatagcctatatttgttttgaacaggaaagaaaataatttttttttttttgagacggtgtcttgctctgtcacccaggctggagtgcagtggcacgatctcagctcactgcaagctccacctcctgggttcatgccattttcctgcctcagcctcccgagtagctgggactgcaggcgcccaccaccacgactggctaatttttttgtatttttagtagagagagggtttcaccatgttagccaggatgatctcaatctcctgacttcgtgatccgcccgcctcagcctcccaaagtgctgggattacaggtgtgagcctccgtgcccagcaagaaaataaattgataggagatggagtccttactaagaatttgattttttgacagtttaaagaaaaacacatttttaaaaatatatattccttctttgattttcactggaattagaaaaaggagaataatgttctcatgagagaagtgtcctagcataataaaagcaaagcctaagaatgaattgtttagtaagagatttcctgtggctaggactggaggcaaatttttttgaacagtactgtctgacatatattcaaagttgtttactattctatgtgatcattatcctctttgtctttaaatcttcaaattggttacatataatatccttgtgtttgttttaatttgggtaatgagggagaagatgatggccatggtgggcaaaataagaaagggcttagcagtacagaaggctaaccatgaacagcaatcaaggattaagcaggggcagcaacttaaagggggagggagaggagatttcacttctcttccagatttccattctgttcttctcagagaatctgcagcaatattagaacactagacttctcatagtaagtggaatggggactaaaacctaaaagacttgggaattctggggaggagggtggaagacttggggatatttgatttaaataactttcataatcattaggctttcttgttttaccattttgggtagctataagatacctcacaaaaatattcctgtagttaccttcagtatctctgaagtgataacttattaataaaattatcattagtgccctcatgagacatagaaaatgcttggttgcattctctcttcctttatttcctctttctttttgcatatttggggggtatgtgtctatctgccgatgggcagaattttttaaatatagcaagtggcttcctaacaaggtgtttaaaattcataatgaacatgttataggttttagaaacaacctcattgttaataagactgagaacttgaggcacaaagagagtaactcgtttcagcagaatgtggaatataggcacaatagcatgaggtaaaacaagctgtagtatttgctagattatataggcagtcaataccattgccttcatgtaatttaattcttagttttgattttctgttgaagtaattgatggaagatcaacataaattaaataatattttcattttttcttaaagacaagtaatacaactctgttttgagaaaatactatttaaaatatctatttttaatgtaatgattcagttatctatttctttgagttttcctaaattaagttttgctgttaaaaaaccttaactagataagcatctgttccttttgcatggttggagtctaccctcttcctaagaataaactcatttcagttatttttctttaataaagcctgctctaagactgccatttatgattctcaatttgagtggccttttctcaatgcctgcaatttaagtacataatattttctattgtttttcctgcttactctagtaaattactgccattgtctcctgatctacctactgtttcaaatctaaattgacaatacaaaacaatttgaatatttggaacaatatttatcctctaacataggtcagatattaataaattcttacagaatccccattaagagaggtggctgtgtcatggctaagagcatggacttttaaatgaaatgcctggattttaatccaggcttcaccacttacaattctgtgaaactggacaaattttaaaatctctctttaaatggttaccacatctggaaaatctcaatgaaatagcatatttcctatctggttgttgcaagaaaaaaatatatatatatatatgtgccaaattacagcaaaatctatcccatggtatttcatgtattttacattaaaaaagtacactaagaagcaaattcatttaatagtcaaaataccaattaaaataatctctaatgcagtggtatgttgatttaaatcatccttaatgttatctgcagtatctcagttgttagaggagattatttaatccatgaataataatatattattgaaagcacaagtatattggcatctgtcttagtcagtcctggctgctgtaacagaataccatagactgggtagcttaaacaacatttattcctgagttttggaggctgggaagtccaagttcagagcaccagcagatctctaactcttggtgcacatcagtaacccaagtctcctctccttgagtgtggatggaaactgtgatttgtttcttaaccaatagaatatggcaaaggtgataggatgtatgtgattatgtgcatgtgattatataagattgtaatgcgtgtcttgtgaaaagcctttcttttttgttggctttgtagaggaaagctgctgtgctgtaagaagtccacagggcaagaaacttaggccctcggtctggcaacccacaagatactgaatattcctagtagttacatgggcaaagaagtggaactttctcctctcaagctttagagaaactactaggctgacaccttggttgtagccttgcagaatactcagttaagctgtgctcacactcctgactcacagaacctgtgagacagtaaaagcatttttatggtactaagtttgtggtaataggtaggtaattaacacagaatctttgctctgtagtggcagaaagcttagcaaaattgtctcctacaatttatatggaaagaagaatttgtaaatatcatgcacatagttatctagctaaggagatttttgaggaaagtattgaatattctgcctaatttcttcttgctgcttacggtaagatgcaagaggagaggtataaattgacagaactgttaaacaaaaacaaacaagggctggatgacttaggaaatgctcggcctctccagagacaaaaaaccccatgacatttgagaaatgactccagtccctgccacaaatgaaggtctaaagaaaaacatgggggtgtgattgtacaaccttttgttaaaaacctcggaaaaatcaaaggactagagtagtcttcagttacataaactgccctttcaagagattgaaattgtgcctcatggaactttttgattaaatgatagtatctctaagaagttaagtgtattgtccttttgtctaatggagtgaacctcagtgaaattcacaggagtcctacgaagtatttgagaaaattgttacagcaaaagcaatgttaactggaactgaaagtggcagagaataaaatgtgaaagaggcttctggaccctcaaattttaggcaggagcaggctgttaaaattactcagctgcaaacatgtactttctctctctctcacacacacacacacacacacacacacacacacacacacacacacacacgaaggatgattcagagggcaaagctgagagccatgaagaattatcctatgctgagaaacctagttaagaacatttttaaatttgccaggctggatttcagaattgctatggaccagtgacgactttgtaccttctatttcccccattttgaacaagaatgtctgtatgtctatagatgttttcttatgcctgttcaaccactatatgttgggtgtgtgggtgggcaaataacttgtctttttagtttgacagattgacagatcaatttaaacagccttcatcaatgcctggacctgatttagataatacaattctggatattgtgcagatgctataacagggtggaactctgggggaccttggggagaggatgagtgtattttgcacgtgagaagaatgattcacattcttctcacgtgcaaaatacactcatcctctcccaaggggggccagagggtgaactgtggcagacagaatgtagggtgcctccatggtctccacctcccacatatttatgcctttatgcagccacttttccttagtgtgagtgggatccatggctcacttctaaccaatgtcaaaagagatgtatgtatgtaattacatgaatgtgatttagtcacatatgattgcaattgtatcttgcaaggtgactctctttttcccttgctggctttgaagaagcaagctaccatgttataagatacacatgaagagggtcccatggcaagaaactgagagcagcctctggccaatagccaataaggaaccaagatcctcagtccagtagcctacaagaaactgaatgctgccaacaatcacaggagtgaggaagcagatcctttcctaattgagccttagagaggaaaccctggcctataccttgattgttaccttgcagaagagccagctaagctgtgcctagactcctaacctatataaactgtgaaataataaccatgtgtttttgtaaggtaccaactttggggtaacattgttgcacaagcagtcaacaatgaatacatagaatttactaaaatgtaagtttcatgattgcaaataattttgcacatacctagaaatgggtctggaatttggaggtgttcagtaaatattggtaggaaataaagaagtcagaaagaaagggaggaagcacaggacagccactgagacatcagtgtggtcttgcgagcagactattgatgtgtcatgtgatttgctggtacaaagtaagtttggtaggatgtgctggaaaagtttttttctacatgattttgtatctgtgtcaaatgaatatggttatttacatattgagttgagggatttacatgtaggtgtttggttaggaggaagaaatgacatggatgtcaagtttacaatttctcagtactaccctattccctaatattgtgataagaactagttatagcagtccaatctcaagaaatagctccactacttctcacttctgagaatatatcatgattatatattataaatatataattatatgtattgcatatattatatgtaattataatatgtattattgcatatataatacgtaatataacatataatatataattatatataatacatatataattataatgtattttattctcagaggtgataagtggttattatataagaggtggttatataatatataattacatataatatatagtatataatatatatactgtatatacatatataatacctgtcaagtaaatggaatcatacagtgtgtgatcttttgcatattgctttttcacttagcataatactgctgaggttcattcctattgtactgtgtatcagcaacttcctttttactgctgaataatgtgctgttgtatggttgtgtcacattttgtttaacaattcaccagtcgatgaacatttgaattgtttcaactttttgtttaatgaaaacaatgctgccataaatatgactcatatcacatgaaagtctttgtatggatatatattttcatttctcttgggtaaatttctaggtgtaaaattgctgggttatatgatacatttaagttaacttttgtcatgctatcttcaggacaagatttagaaaaacaaaaccttgtagtgcttaacaatgctctttataaataatatttcttaaagctcttttgacttgatttgcatgtttgaaaaaaaggtggagtatgggctgcttattttatataacaaggaatattaaatgtataaaaaagcacacctttaagtggaaaggatatgtagtactctagtcaactactgatagaaagtatacatacagagagagattaggtattactttagaaccccaatattacccaaaatgattcacttataggaatacttgaacctatattaaatgaaggtaattaaaaaaaattagatgcatggatctaattatcacacattttgaggaaggaaatataagaagccatttcatatacttatttatataacatctctcaagtgcagaaacataaagctaattagtgtaaattaatgtacaaatagagaattcatagcaaataaaatgagaaactatgctcagaaaagattgcttctattgtaatgaactgcaaatgccttagcattttcattggcttggtaaaaagttcattgatctgaataaggggaatcatgagtgtaactgtaactgtttttttttttttttttccagaaacaagcgtcactacaggctttataagattaataaagttttctaggaattaagtacaaaatatccagaacagctttcaactcgtatgttatgtgtatgattcttcttctcactttaatgttaatttacttatttgtggaattctagcacaaaaaggcacttagtgaagattaaaagtgtagtctttggaataaatataaaaggaaaataacatcgatttagtttgtcttcctcataggctgcaagagattaaaaaatgtaacatgatttaagaaggaaaggcataaattaatgaacaatagatgatgggtctgaagaaaggtatataagatggttgtatacgttcctaagtgttttggtttgtttatatggagggcatcaatattatccctggagacttcttctaggtaccattgtcaaagagagaataatcagctacagaggccatgggtgcaacacggtgtggtatttcttctgttctaagctctaggtatgaaaggctgggctattcaagagaccaatactaagtgcataacaattctttacaataccaagctttttaaaaagtcaccattttttttttggtgtccagatgtcatacatacattttgcaatggtaggaaacttaaaaaaaaattatgtgtacacataaaagattgcgtgagtgtgtctacactaggactaaaatttggggaatttgtaagtcaacttcagcatgggaaaattaactggcaactgggtaactaatgctttttgagtgactaccatgtgctaggcactgttgtaattgctgtatacatgttaacacatttaatcttcttaacagtcctatgatgtgggtataattagggtcatttccatttattggatgaggaaccgtgaggcactgggagttaggtaaatggcccaaaattacacagcttggaagtgctgaggtcaatatttgaactcagacaatctggccccagatcttacattctaaactaatatgccatatcattctctttactgattacactgagtaacttctttgtagaaagtaagatatacttatctgagtattgccctgttatcccaaaatacatactacaataaaaatccttcatatttaccgtatactaattgaatatttgtaatcatttgaaaaaatgtaatacatttccatgctgttaataattatgttgagaagaaactattttgtaacttttttgaaaacggaaagtacttttctgtttaatatcttttaaatggaaaatactttctatggtcgtgattataaactttcctttggttttaattctgtctcagggtttgttggtggtgaacttgcctgattgaaagtcttgggcaagtttgggatattctcactctgacttaagacttcgcaatgcatttgaactcctctgtcctgggcaatgtcaggattggttcaaataattattcataagacataaaatgtaatgagaagaaacattataggcaaatagtcttttagaaccttgttttaaattaaaacatggttttaatttacttgggcattttaactaatgcttaggcattttaaatgcaaaattgatagcatcattaaccaaatgaaaaatcataatatatgtctttcagataaccaaaaagaggtggaaaagtctagcaattgataccacaaagatactgaactgtggtttagccaagtagagggcatagctcctgggagtggaacaagttgcttctgaagtatgagtttataaacctcaaaacaagactagtgacaaattttgcttcaatacgtctaagttaatatataaaataagatttctggtggagaggtttatagatttttcagtaaacaaattgtttttaaacacctttaagctggagaagaagcaactgcctacctgtaagtaattggtatgctaactataggtaattcttttctaggcatcagccaaacctcataaaaaacactactgtggtagttatttcattggtttgaattgtctcaggcacttgcaattttttcaaagattatatttctctgaaaatatcctataacttaacattttcactcttctggctgttctttgcctggttacttcaaggggtttctctcaagtactaccgtaacttacaggatggatgttttcttattcctatctgcaattctgtgaaaataaagcaattgttcagtgggtagtaatatgaatgcaaaaatatgtctccacagaagcattagcataatttactgtacattcaatgaaattaagacagccaataaggaatataattcttatttattttgaaatgatggtaacaaatggctttgttaccttcaagcttcttactggcttaagctcttttaaaattctatggactatataagctactcaattttaagttttcatttttgaattcaagcttttttggttaggtaaagaatagaagtaactaccataaagaagaaaatataatcatctaatttctcctgaactctgtataacattggccattaatctacatcaatatatggtgaagatatgtaagcagaatgtacaatgtataagacatgcatatatcaatataaggtagtaatgtttattttaaattccgcagatccatttagattcctttggttttatatttggtctattttgttactgcctctataattctgcttatttatttcaaattttacaacatctatttctcctttgagaaaacgtagacaactgatattgggatagagtttaaattgtgagaaatattcagttacagtaaaagaaatgcattagaactagaacttgcgtgattttaaattttattagaagtaggtgtcaagttacctaagatgtccaagagacagctgatgggttatgagttaaattttgggttctgcttatcatttcttagaaatcaatttaaggcatcagttttcaatagcttttttatgtataactaaaaaagagatatatgatatttggtaaaataaagatacatggcttccagtctcttgagacatctgtcttcatgaaagagatggagagttcccatttctacttacaagaatgaatgtatgtcataataaagaccagctatcatttgttatatacaaaatatgtggttctttctttgactttttttctggatttagacaaccacagatgacatttatgagaaatgaactacactgaattcaactgagaaagtagaagattctgtatctccattaacttgtgagaggcttatcattccaaaccttctccagacagcccagcgatcttcacattctctcaactccgtggtctatgactgtcatttgtcaattaattgcaaactgagttcatatatagtctgtgtatgtttcagtacacatgtaggaatatctagggaggtattgttgttctgggctctttggaaatatactctgagaccctgagatttacatgaggaaagtttattgaggaatacttttgagaacttgagtgaggaaagcagggatgggcagagggagaagttgaactgtgatgcagttgcaacagaatccctaccaatcccacaggaagggggtctaactttgggtgaggcggcactttttgcctgagggtgattcccaaggaaagactaagctctgaaccactggcaaccaatgtttctgatagctgatgaaatgagagcctcagtctccaagagtgaaactccatctcaaaaaaaaaaaaaaaaaaaaaaaagaggaaacgagagcttcagcctcagtcctgaagctgggatctagcaggtacactacagcatccactacggtaggtaatgtaatgaaggttaatagcacagtccaacagacagatgcattggcttgaaacttgcttctatcatatactggttatgtaggcttgggcaagttacttaacctttctgtccctatgaagcggggataaagatactgcaggttatctcactgagttattgtgaaaatggatgagttaacacatgtaaagcttatagaagttcttggaatatggtgagagctcaacactcgtcagccattattattagaggctgctataaaataacaaaacttgttttcaaatgaacttacctgtatgaatatttgttcctgtttaggtcaggtgggctagtaacaaatacactccaaatctctagttgcttcaaacaacaaggatttatttcttggccatgccacatgtatatcatgtgttgactggtgttttcctcactttaggactcaacctgacagagcagccagtagctggaacattgcccctgctgtggtggagaaaaatatagcatttgaaatgcatgctgactcttaaaacttctacctggaaatgaaacatgccatttctactcgcatttcattggtcaaaataaatcatgtaggtacatataactctgagtgggaaggaaaatgtaatcctgccctcttcctggaaggaaaaccagaaatacttcaggaacagcactaagattatggcaatttaatttttaaaagttatctggggagatatatactcagttctgaaagctaactttttttgagcacttagtatcagccaggcactgtgacaaagagcaatattatgaaatagattctattgcagtaatatcccaatattgtacacttagaaaaaaaaagctgaggccgggtgtggtgtcatgcccgtaatcacagcactttggattgccgaggtgggtggatcacctgaggtaaggagtttgagaccagcctggccaacatggtgaaatgccatttctactaaaaatacaaaaattagctgggtgtagtggtttgcgcctataatcccagctacttgggaggttaatacacagtccaagagacagatgcattggcttgaaacttgcttctatcatatactggctatatacaggagaatcacttgaacccaggaggcagaggttgcagtgagccaagattgcgttactgcactccagctagggagacagcaagactgtctaaagaaaaaaaaaaactgacacttacagaaacttgatcaataccatatatctacaggatggtgaacacaggctcttattcaggcctatctgattgcaaagctcatactcataactaccactctacttccccccaagaacttcagtgatgccagcatgacttgaaattttttcaacacatgttctaagttttttcccaggaactgcttttagagtctatggtttagaggaatctaattccctaaatgtatgaactctcatatgtagtagaaacttctttcttgctcccatgatggtatcagatgggtagatagaccagtagagtggtcctcttccatggagtgggagactgatggacactccatcttcttcggcacaaggtattcaggggttatcttcttccatacagtcagaaggatgccagcgggccaggcctggaagtgatgcacataacttctgcttacattccattggcttgaaactcagtgatagtgctatacctgactataaggaaggctgggaaatgtagttaggctgtgtactaaatgtagacgcatgtactgtgctgtgtgttttcaaggtattgaatagaacttaaaattgggtaaatatacttgaggacggcagggaatctcttaaagtgacttcattgtttggcctgcaatcctctctcatttcagtattccagaatattgtcttattttagtttattccgctctctaacatttagtatcctgtacttcttaacatgttttatagtttggctttgtgctaatggaaagattatggttagaattctttacctttcctttaattttttttttagtatgaatacaggataatacagaggacactctgatagtaattagtaaagaaccctgcattctgaccccagaggagggcttcacatgctccttggccagcactgcatgctttaggggcccacaaggccaccagataactctgaagtctggtgggaaagcaacattttcggacttagcccccagagggctcctaacaaactatatgagtttttaaggagcttcacaggggatggagtggcagagtggattgttgaactggaagggaattttgaaagctattgcaatgaattgcaaaacttagcctttattaatgttttagaaactttcctttgcaggttgggttggagctgttttattgcctactcccataattaatcataaggttactaaaggttggattctatatcacaccatgattctagtgtggtcatcattactggaggcatgaggagtccagtaatgtatatcacttaaaaatttttaaatgctttcactaacactatatattttttcattttgttcactagggagactcagggtctattctccctctactttgtatttctagactaatctagggtttttatattttgttacatggaacatgtatgtataacgtctctaaaagttaataagacagatacctgcaaaattatttggtagaagaaaaacaggttcagctaggttgtattactttcctcaggtcatgtagttggtaataacacctcaaattttgaagcaagttcttctgacttttcattgttcttctccctaactatgttgcttatcatatttgttagaatgcaatctagaaaagtaaatattgactctttgaggatcaattccagttttgagaatagccgaaagttgcccagtattaaaagttggtgactaagttagataacattattttggataaataataaggtatgtttataaatatttttgaagctcattaaattgacaaataatatatatccttaaaatatttgttagcttcaattgacaaaaatgcacaaatttaaaaaaaatgcataagctgactatgtatccatgtgactatcaattattttaagatcggaaccagatctaaggaaactgaaaacagaaactagctgaaagaaaacatgcagagttcaaacaatggccatgtttaaaaactgaacttttcttttcagtgattttttaatgaagtctagtatgcagcactaagtgtgtgacttggcctttgagaggggttattcataaaggtggagggggaatgagcagttattcctatccattatgtgttaggtgatttatttcatttaatccttgtatctgtctatgaaacagataatacttctattttaatgatgagggaagggctcctggttttcagtacctgatcaaaggtcacacagctagaatcacacagccaccataggaggcagagcttgaattagaatcctagtccatctgttccaaagccaaggtctttcttccaaacaatgctgcttcttttcaaagggataagaaaggatggggatgaagtaggttgaatggtggtttcattcatgaatagttgttctgagggtcttagtcattacaataaataacaacaacaacaacaaaaattataaagattacaaaagaagtgaaagtgttccctgctatagactgttcccaaaggaaatatgcaagtctccaaatcatctacatgaactaacaaatacattcagtaagggcacaggaaacagagttaatataaaagaatcaactggttccttgtgtaacagcagcaacaagtgaaaagtgagatgatataaaatcctatttacaggagcaccaaaaatatgaaatatttatgaataaatttaaccaaaaaagttcaagatcactacattgaaaacaataaagcattgctgagagaaaaataaagagggccaaaaaaggttcgtggattagaacactcaatattgataagatgacaattctcccccagttggtcatagagtcagtatgatccgaataaaaatttcagcactcagttttgtagaaattgagaagtgattataaagtttatatgaaactacattaccaaggaaatttttaaaaataagaatggaattggaagacttaccttacttgattttaatacttacaacaaagttacagtaacaaagacagtatggttttggtgaaagcacacacatatagtttagatcagaacagagtccagaaatagagccacaggtacttggtcaatgaatttttgacaaaagtgctaaggtaatataatgggagaaataaaagtcttcaaaaaaaggtccaaggtcaactaaatacttgtgtggaaacaaaattaacatgtatccttacatcaccctacactcaaaaattaaattaaaatgaatcatagacttaaatgcaaaatctgagattgtaaatcttctagaagaaaatatagaaaaatatcttcacaaactagagataggggaaatattttggaagaaaaaagtgcatgaaacataaagaaaacaattgacaaattggatttcatcaaaataaaaaacatttgatttttaaagacaccactaataagatataaaatcaagccacagactgggagaaatgattcacaacacgtatatgaagaaagtaacttatatgtagcacaggcaaaaatacagtcatgactcattaataagacaaacactaaataaaaaaataggcaaaaggtatgaatagactyytccagaaaagatatatggatggcaaataagcacattaaaaagtcactagggaaatattaattatgatcmcaataaaatatctctatatacatacatattaaaatggctacaaatggtaaaaaatgaccattccaaatgttggcaaggatctggaggaaatagaactttcataaactagtttgattgtaaaattgtacaaccacattggaaaacacttttggcagtttctttaaaagttttatacataccctatggcccagtcattccacttctaggcatttactcaatggaaacaaaaacatatgttgacctaaagatagtatacacatgtttatagagttttacttataatatccccaagctgcaaacaacccaaatgtccatcagtggatgtatgaataaagaacttgtgatatatccatgcaatggaatactactcagcaataaaaagaaatgagctgttgatatgtggaacaacacgtacaagtatcaaaataattatgctgagtaaataaagccaggtaaaaccagggtacatattgcatgatttcattttaatattgttaaatgtaaatttatgtatagggatagaaagaggatgagtgattgctcggggaagagctgcgggaatgcatggcttatagataggcacaaagaaacttttaagagtgatggacatgttttctgtttttatcatgatgacatttgtatacatgtcaggttgcatgccttaaatacatacattttcaagtacttcaattatgccttaataaggttgaacaaattagcactagcagacaggtctatagattttccagctgtggagcaagtgagcatccattcttaaaccctaggttaaattccagattaagatggcataaatctaattttgtttactcctgataatcgaatctaaataaaggaattttttaaaagccacaaacctttaacaaacaagaatagggaaatgacaacaataaaattttgaacacttgaatcagattgaaaagtagtaaattacctgagaataccaaatcttcaactgggaatgagtaaagtcaagaatcaactcagctgatgttgcaaaaggctcaggaattatcagcactgactactcttggaagtgggaatgaaaggatgaaggtaaataagaactgtttgcaatctgatttagaagcattagatgcctagattccccctcacctgctctatgatcctatgcactgcccttctctgtccagacatagaactggaagtttattcctgggttgagtaaaacagagagtctctggactggggatgcctggcaaaattgagaatagcttatactgaaaataaggtgctcagagaatatgtgcacaatgaatgctgaggcttgtagcctacttccctcatggacttgagaaacaatagtaggcagacttttccttctgggcaggagattgaatactctatggaatctgaccagcccaagaggaaaacatctaaagaaactgacattgaaggttccagacgaacagcccacccagttctcttgactgtgaaactcttggtacaaaagctgcgcccttggacttatagcttccgtcaactttttagctccctttcctaaatatgagaagacaaccaagaattgctagatagctgatgaaattcctaaatgagatataacaactaaaaaagaaaaatccaatttggtggaaagaatacttttcaaaaactctcattaatatctccagaaacagaagaaaaaaattatatacttataaagaacaggatgcttcaaaatgaatattcaaaaaaaccttggaaatttaaataaagtagaaaaagaaataaaatgctcaaaaaaagacttgagagataaaggaatttcttcctgtgactactgcaaaaccagaactcaaagcaaaataaaacaaaaaacagaaatggaagctaagaaaaaataagaaaatcagaagaccagctcaaagtccaggagtttcagaaagacattccagagaagtgaaggggaggaattcattagcaaaaataatttaagattattctccaaaacagaaagatgtgattttctggaatgaaaggatgctgcaaagtcattaaaaattgatctactaccaaggctcatcatgatatttcagagtactggggataaagagaagatcacataagcttccaggggaggggaaaaccatgttatttaaaaggaaaataaattagaccagcttcagagttcataaaagtaacattgaaaactataaaacaatggagcaatatcttctacattcaaagggaaaataatttccaacctagaaatctatactcagccaaacagtcaataaaatccaaggaaagtctcaaaacgtttactcccatgtacccttccttgggaagctactgaggatacactttattaaaacaagttagtgaaccaagaaaaagggagagattggatcgaggaaacaggagatccaactcaggagacaagcaagctccctttgtttgatggtgaaaggaaatctttgaatgagaattatcagacataaaggggaatcactggagtgtaaatcaggttataatttcagagagagagatgtcttcaaaaacacaaagttgatagaatagttaaggtaaagaaatgtattgagaaggtatttagcgatatagggaagaacttgaagctgacttagggataagtacataaaaagttaagcaaataggggaaaaccagaaacaattgttagctccagggtaagtaggatattgagcagggaagaattttaatcataatttatattatggttcatttttgaattatatacatagatttgataaaatactgaataatcaaaattttgatttaactctatactaggaaggaatggggtatggggagtgaacatttacttggagagcaaaaagaactaaactcttaccttgtgtagttaatacataacacctaaaactgaaaagaaatctagaaatagcagtatgatcatgtttttggggtaaataccaagactcagctaagagttgaaactgattactttgtggaaggagaaatggaaaatgggggtgtcttgagattcctgtttgtattaacaagtcatagaagtagcttactcttgaactatgtgcatgtatcactttgataagaaacaaacatttaaaaaaaattgtcctcagttctagaattttcaacccctagaaatttctattcactctggtgtaaaccttgagaacctcccaaatatgtgatgagatcgtggatctcataagctctttgctctagggtagtttcaagcatggcttacatctgacatagccgacctcctggtgaatgatagacaagtgagaatatccaggtaatattcgcccttagaaacgtggagagtaactaaattttgttacgttggggatagagacaagaggagagtggttccaccatcagctagcttgttagcagaattttcatgtttgaagcagaaatattaacagaaaaaaaaatgcaccattaggtacgtgagtgatatggtctgaatgtatgtgtgcccccccaaattcatatgttaagacataacccccaaggtcatggtagtaaaaggtggggcctttggaagatgattaggtcatgatgctaaagctctcatgaatgtgattagtaactttataaaggggcttgaaggagcctgtttgcccctcctaccatgtgaggacccatggaaagttccatctttggagaagagaacaggccctcagcagacatcaaacctggtggcacctggatcttagatctcagacttcccagactccagaactgtgagaaataattttctgttatttaaaagttacccagtctaagatattttgttacagcggcctgaatggactaagatagtgggaaaagtaaagatgataagaacagctaagttcagagcagattcatttattggatcacaaaggaagatcttattcttgttttggacccataattaatttcaaggggaagtttgctgctttatataaaatgggaaattctgaaaatacttctagatgaggcactatggcaatattactcattcagaaaggttgaactttttaaggagctttttcttctttgattttatgttatttataaaggatttaaggtaccttttagtgtttcatgttctttgtttggaattctggacgtgatttcctgtggaaacacttgcaggtgtttgggtctacaatgccaaccctctaatgactcattcatctctggttgccacaacagcactgaactaatttttctatggaaaaattcaaatatgccttcatatagggcagtcaggaatacttgtgaccttattttgtaatggaaattaaaaaggactgatgataggtgggatcaggagtagagatgctctttaagggcaggagagtattactattgggaaaggtacagcttatagcagtgaagatttacaattcttcttccagtacctcttggcagaaaatactgtggtatccagaccccattctgaatctgatttgatttatttcttgggctagaagagaataaacatgtagttaggagcatttctaggcagtaataggttgaagagacaggtagagtggaatctcaagaggagagagggaaggaaggagatttcttcggtcacataatattctagttctggctcaagatattttatttacatatatatgtatatcttctgagttggatgcatgcacacatatgttgagctcgtataaatcaaaagctgtctgtacatcattttggtatcttgtcaacctcacaaaaactagtatcaatgaatgttatgaaatttcacaattcattagagaaaaatgaagtttaaatggtaagaatataaactcttaagttaatatgcttaataattaagaacttttgccttggagtagatgaagaaacccaagaattatatattaatttaacgaagagaaaaatatctatttaaagaattgaccattttctaaaattccagarcaacagtgcacataattggatgctcataacaacacagaaaaggatgctcagtctgtgaagttcagtctcaaccagttttgcattttatcttcatctttaatatcaggatagatattataacttaatgctttggtattttcctcaatatttcctttgggagactgaattttttcatagataaaagggaggtatacagatacgttcaatcctatttaccagaatgagtttttggctcatctttcatattgttttactgactgctatgaagaattgtcctcctcctcttttatttcatagaacatttctttttctttcttctctttttcttcttctcctttttctccttctcccctccccctccttctttttctccttctcctccttattctcctcctcctccccctcctacaacttcttttccttcctcctcctcttcttcttccccttccccttcctcctcctcctcctcctcctcttcttctttcttctgaaatggcgtcactcggttgcccaggctgcagtgccttagcacaatcatagctcactgcagcctcaagctcttaaggctcaagggatcctcccacctcagcctcctgagtagctgggaccacaggtgtgcaccactgtgtctggctcctattacacagaacattttacttggttttctcactgattttgtgatgttgtcctaattmcatagcgctggcacaaagattatataagcagtagggtactttgtggactcacgtgtggccaggtttgtcccaggatcttcaccctttcactcccttacttgtgactcaccccagcctatacagtgggaagaaattgaggtggagttgaagggattcatagaggtaatgaccccttggattgctggggagggctgtggcaacatcctccacccaccgccacctcaggtaaaggaagcagaggtgagaggaggctcttctaacacgtcctttaagccaaccaaggagttggctgcaaggatactactaggagacagtgagggaacatagaataagaggaaactggccttcttgtccccagctggagacttttggaagtacagaagccctttgcctttcctggggctgccagggagtacagaatcgggagtgaaactgatcctgagcgagtgcacagtgctccttgatgattactcctccgcaaattcagagactggcgcttactgcttatctggggaattctgaaggcaagggggcagctggaacagccataacgacagcaaaatgagggggtgtccgagagtagcctrctttttttaatcctgtggcatggaaaggatgtgtgactttcccacagatgaagaggatgctgtgaaaggtaaaagctcccttaaaagtttcttgcttcaaaggtggcttgctaaggcaagagaacaccctagtagtaggttgggatgggaggagatatatcattaagaataggtaagggagaatgtcaagaggcgagcacaagcgtgtgcttgccaagcttctaaagaaacttcctgtgtaccccactgaagtgctaggatttggatgtctgaccaacccagaggtcactgatggccagccagtattaaccaagggagggctaaaatgcagagtaattgaagccaacaacaaaacatgcacctttcctttagtcttctcttcctctgttctgaccttagagaaaccagaagagtggggtaaggataggaaggaaaagagaaggaacagtccagtttcttctccaccactgcagccctgagttaggggagtagaagagaagctttgaattggatatgaaattaaattttgatttagactggaccagatacctttaatccctgcatggrtgccatcattgatggaatggggcttctttgtatacctgagagaatggggcagctatgggatctgcctgagacaaggactgagagatgcatatccaacaaagcatgcttaaaagcagtgattggagagaagtaaagccatttcctgctaagttcagactgttcagtcaattgattatactgagagagattatgcagtaaagttatttagctgackggtaaagagtctctttggggatggtgtgcccagcgcacaaggttaaggagttggaagatttcttctgtgaataaaatcaatgtttggggctcagtctatcgggaatgacttattactagtactaaaatttgtgtgtgtgagatttaataagtctttaatatggtcttcatttgttgcttcatttattcaaacatttattaattgcctctgtcttacacatagaaaaaaacctaatgctaaggctgttgtcactgcgctcaaggagaagaggaaaataacagtaatttatacctgctagtatgtgctaggaactattttaagtgtgttatgcacacaaatctaatgtaattaatccaaaaggtagttgcttttataattgtttaataatgaataaaactgtattgcaaaaaggttaagtaatttgcctaagattatgtagctagtaagagttgaggctggaatttgagcccaggaactcatgctatgctgcttctcataatataaggtatttcctctaatacagaatttaatttagactgtgactaagtttaaagacaagattacaaggagaaggattaatgtgacctgaaaacattggataagacttcagactcatatgttccaatgctcctggaaggccaaccataaatggaaggtgtatytttaggacctggaatgaaagggcacggtagtatcatttcagagtttcagctgtttgtaatatttattataatatcttttttggtcttatcacccagagacatgttctttgcaataaaatagacagcttaatagatttctttaatattatttggagcagacatcataatttcatttagactttaagccttaggagatatctatatatgtatctataacatctgtatctatattatctaacaacgtctgtatctatttgtatttatatctgataatattggtgggtcatttgtagagttgtccttgaattctggaacaaatctcttctgatgcattctgtaaaatatgaggaaaaagcctttaactctttcatatcccaatttgggccaagggaagtcatagctatagaaaaatgacaccctcaataaacaggaacaattagaaggctattgcttgttgtattttgggaacagctttcgaatgctggctttgtggcacctcttaccccagaataatgtggtattatcttatatatgaagaatttagcattctagctgctgagaactcaacatttctaagatgctgagattatgtatcctatcacttccagaaacagtttttggaagaaagagagtctaggcctacagcttcttaggaaggcttaacacagggtttttagttgtgctattgtggctcctaggcaaagtgcagaaatgagagagccagtacctgagtcctaaacctccttctgacaacaatcctcttcatgaccctgggaagggcaatcmactttccggaacctttttatcacatatgaaattaaggggtttggactagatatctaggattctttcctggtctaacatttgatgtatttctctatggttcaaagcataacctaatggggaagtttatgacattctaacatggcatactgggttaggagtggatgttaaaatatttatttataccactctttcatcagtaaatacagaaaaaactggtgtgaaacttaccagtagggcaagaagttgattacctctcttgttttgatctcttttattacatgtctttgttttgcaggcctctacacttcagtgccctccttgacctagtaataaactctcctccacactgaagccttcactgaaaacttcggaatagaagttggcataaagtatagtaattaygactttcgtggactgaygtgtatgttaaggacttcaaagcatcctactattcagatgtgtggactgtgctaaagtagaagaatctataaaaccaaaggaaaacaaaagtgacaaaactggaggagttttatttttatggagwcagatgggcaaagtaaggtaggttgaatgccacttcagttctaaaagtctatttattttctcttggtctgactggaagtgccatctatatagcccaacattttcaagagaaggatgacgatgaaggcttccatggcaaaataatgagaaaattgtcaaattgtcaaaaatcaagctttaggattcaacctttgacactcatgattcatgatatgctttctttactcagcagtggtgtgtgttactttaaatgtttagaaaacatacatgtgcatgtatctttatagcagcatgatttatagtcctttgggtatatacccagtaatgggatggctgggtcaaatggtatgtctagttctagatccctgaggaatcgccacrctgacttccacaatggttgaactastttacagtcccaccaacagtgtaaaagtgttcctatttctccacatcctctccagcacctgttgtttcctgactttttaatgattgccattctaactggtgtgagatggtatctcattgtggttttgatttggatttctctgatggccagtgatggtgagcattttttcatgtgtcttttggctgcataaatgtcttcttttgagaagtgtctgttcatatccttcacccactttttgatggggttgtttgtttttttcttgtaaatttgtttaagttgattgtagattctggatattagccctttgtcagatgagtaggttgcaaaaattttctcccattctgtaggttgcctgttcactctgatggtagtttcttttgctgtgcagatgtgcagaagctctttagtttaattmratcccatttgtcaattttggtttttgttgccattgcttttggtgttttagacatgaagtccttgcccatgcctatgtcctgaatggtaatgcctaggtttccttctagggtttttatggttttaggtctaacatttaagtctttaatccatcttgaattaatttttgtataaggtgtaaggaagggatccagtttcagctttctatatatggctagccagttttcccagcaccatttattaaatagggaatcctttccccattgcttgtttttctcaggtttgtcaaagacacgtatgtttattgcggcactattcacaatagcaaagacttggaaccaacccaaatgtccaacaatgatagactggattaagaaaatgtggcacatatacaccatggaatactatgcagccataaaaaaggatgagttcatgtcctttgtagggacatggatgaaattggaaatcatcattctcagtaaactatcacaaggacaaaaaaccaaacaccrtatgttctcactcataggtgggaattgaacaatgagaacacatggacacaggaaggggaacatcacactctggggactgttgtggggtagggggaggggggagggatagcattaggagatatacgtaatgctaaatgatgagctaatgggtgcagcacaccagcatggcacatgtatacatatgaaactaacctgcacattgtgcacatgtaccctaaaacttaaagtataataataataataataataataataaatgtttagaaaaaaattctatcataaatatgaccatttaatttcctacaagtttttcaaaagtttcttcttgggtttattcatccctatggaaaattccttagagagatttargaatcttcagtgaatacttttagaacaaatggaaagaaagcaaaaatgctgtttcatcattgagaaaaataaaactcaaaacaagcttaaccatcaaacctcttctttattccaatttgtcatatttgtaatagcaacaataagctsttcttagaaataatgtgttcttagaaataaataaaatgcatgtttcttactgctaaatgccagtgtacaatgaaatttccaagccaattttttggggaaaaggtgtaacttctgtataatgtatttaggatcttaagtggcatatttctgttggatggtttatatgttatctatagatagcacctcactactaaggcataataaagaaacttgtgctcaaagaggagggataaaataaaaatagaatttgatttcaacaagtggatttgatcatttgcaaaatggtgataacaatcctttctctaactcacagcattgtcatattattagttaattataatgttaatagtactaatattcatcatctcagtgttcccaagagggtcccaaggaggtcatactaacttcacttcttatattttccagtttgttagcttacaagttgtaactgcagagtcttagcttcacattcaccttcccccaccatttctcctcaggtgtgccctagtgtgaactaaatctgtcactctttttctgttcttttccttaaggggtgctgccatgagaacgcagatcccctacttctctgaaaagtgcagtgacattcccactgctgtgttgttcccccttagtttcttcagacacatctacaattttccttcctcccagaactgggaaaagctctttttctttgcatggactttttcacctgagtttgaaagcaccgggcatggttgtgcctttaagtttcacaatgctcttcataaaagtggtctgaacttcagcatttctttttttttccctgagatggagacttgctctgtcactcaggctgcagtgcggtggcacgatctcagctcactgcaacctccgcctcctgggttgaagcaattctcctgtctcagactcctgagtagctgggattacaggcgcccaccacacccggctaatttttgtatttttagtagagatgaggtttcaccatgttggtcaggctggtcttgaattcctgacctcgtgatctgcccacctcggcctctcaaagtgctggtattacaggcgtgagccaccgtgcctggcctgaacttcagcttttacttgtagtctctctctctctgtgtgagaatgagcccttgttttgctaagccagcctggagaatacatcccattccaccctccatttttttttttatcatccttcttcctttgtttcttcctcaagtctctcttttctcctttacaaaacacacacacacacacacacacacacacacacacacacacggacaagagcaacaaaccaagtatatccacccacaaaaaaaccctccaaacatcattaattcatggaaatagatggggagagacaagactgtcggccccacaccagcaatcactgactcagtctaaacaaagagtaacataataatggtatacaacagagaatcaccgtttaaattttatgaccaggtctttaataagtatcttgcagcctgttatagaaaaacactttcaaatagtgtgatatgtctcataatgggaaaagcgtcccccrgaagtactgagcatccagcaataaaggcatttaagtagacatatcatatgatcaactttaagaggcagtttccaacatgtgttgtcttcattgccggattggaagaaacccgggggcaacgtatcatttatttagcrtaacattgtattttgcataatactagagtttctaaagaattttcatatatactaagctattttaatccttgcaagcaycctgtgaaataaagcaaggactctgcttatttaataaataaggaaagaggctcagcatgattcataaattttcctggagtttcaggactggcaaatagcagaattggagtgtgatgccagccaattatatccttaaactttacatatattgcccagtgtaaaagttcaagaatgcttatttctttgttatctggaaagggctgctgtaaaagcaaacctaagtgagactgtttgatcgtccatgcctgccccaaagttccaagaagttttgaatcacgtaaaaacaatcagaaaaccctgttggttttattcctttttttcctccatcccagctggactgaaatatgtaaaatctatgggatttcatgtcataccaactgtgcaaattagtggcacaatagattgtgagtttcttcagggcaggaacctttcatcttaatatttcccccttatgctgcatagtattgacttaaatacacacacacacacacacacacacacacacacacacttaaagaaatggatagatggagagatggatggataggtgggtaggtggaggtgaccagggaccctaaagtctgtgactcaaggatctaggcccagttcttaaagactcatattgcagctgattttttaagaatctccccaactttctcgctaccattcgacagagagagagacattctgctacattttttctcctgggtggcctataacggttcacattcaccagttcttgtaacttgtttttcactcaaacccagcttgctgttagtctgctgtgtctaaatagtcatggatcctgcacctgctctaagacaggctgttaagtgaggcttcctttcggagactgcaaattcaggactccaggcccctcagaatggttgtttcatgatttatagctggaggtgtgtacttctgtgtgctgttggtcaatgatgataaagtaggtatcagtgcctctgtgaattttctgttgccctttcataaccaccatttaggagcatttaatcaggaataaagtgctaggggtgggaaaaccatttcaggttgccattgcactgtggaggcaattgtggacttttcccccccatattttctaaactactaaaaatagtgtttcacatttacctgcataattttatgtctgctctttccctgcttgagcagataacatgatgacagcttctctgacccctaattttccttttattttcaactttgaccatggagacatgttaagccccaaggaagcactcatttttactatcaacaggtatagttgcccccttaactggtcataatgtctgctaaatagcatcaggccctagtaatccaggaggcaatccacattcccttactgaaacagagaaggggaagattcaagatggaggggatattgaatagttgaatgtcatgcctaagtattcttacacgtttacaggtttagtatgctgtggatattgatgcttataaatctcaagattttggcagttctcaaagtacagtctctatcaccagtagtatccgtatcacctgggaacttgctaaaaatgcaaatttgtatccacccccatccccaatctactgaaccagaaaatctggcggcagggccagcaatctgtgcatttgcacagatgattctgatgctcactaaaaattgagaaccactggttttaggaagtttacaaaagactgaacctttttctttctgtctttttaaaacattggtgtggacaaattaaattgtcccttttctgaacagcatttaatcatactgaacaattattcataccttttcttaagcatatgttaatcatattagaaatgccattcccttctcgtgcaaaagggcaaaatcagcaacatccttccaatgtgggtgggtaaatgaaggctctgatacaagaattgaaatgaaatatgtgtgcaaacagttcttagtactgagctgtttaaagaaggcctacctttgcacagaaaatgtctataagaattactcattaatgccacttaatagaggaagagtaggagataacgtgggaacagggtctttttaaaaaataccactttaaagaagaggcttatgcttcatcatagacaaaatgctttgtatagtactaacaggggcatatctattcctttaatgacactctaagccagtgctttaaaattttattgttgtttttattgcccctggaattccatttatctatgatagtgttggattaatgtgtggtaagcacattgccacatcagtccatgattaattagccgacatttattgagtacttaatatttgacccaaactggatcaaaactggggaatatagaaactgtcgtctctgctaacaagtttgcaatctagttggagagatgggagtaaaactcctgaaaaacttgggctcaataagataacatgatcaagagtgaggagacatgatatagactgcaaatgcagggaaagtgcactttgtggagtggtcactccagtgtttagtatgtcagaaaggaggcttcatggggcagacggatctcaaaggatgcctaagttcagcagtggattgtttgcagaaatggcctaattcttcccctgcttgtatctctgctctttggcattgcaacttttcaggtccttatgtgaagaggtagagtctactcctctgcccctggccttgtaatggtggcaatgttgacgtgctaattctgattctagacctcaagagacctcgcacatctccggccactctattgaaacacaaccagctgccatgaacaggcccaggttaagtctgctggaggaagagaccacattctttatgagatgagatgtttcagcagaagccatgggagactagatagcccccagcagagccatcaatgaggtcaacagaagaactccaccctagctgaacccagtccaaattgccaacttgcagaatcttgggctaaatgaaccaacaggtcaccaaatgttgaagtggtttgtcatatagtgacagataactgatacaaatctggaaggtagagaggaagaaagtgttctaggccagagttgtacctcccaaaaagtcgagtcagaaatatgggaggccaggctaaagaaaagtaaagaaattagtaggattggatgtttgaaccactttctttcagtaaatcgctagaagcacccatgcagggttcaagtgaacgtatactggaggccagacctgcccaactatgctgctaaatggtgatcttctcctgaagcgctccatcagggtatgagtaacagggaactccccttgccaagacacacagggagtgtgatgaccctgtccctccaaactgcactttgagagaatggaaccttgttttgtagccaactatattatgccaagaacaaaaagatctttgtagcttatcatctgtttttatgttttatataaaaatctaaagcttctatgacatactttcaagaaactgctagaggcaacacgtagaatcccagagtaaagatattatgaagttagagtactttaaaattcttcagttctcacagtgtggatctatcgcccattgaataacaactttaactgttttatgaggtcactgaatatatttttcactataaaagaacatgagagaaaatatttaccttgaaatgctaaaaatgtgttccctttctgtggaatggcatttgttgaaaggaatatcccgggagaggatggattcttgttttagacatagctctttaaatttggcaggacatgtgggggtagggggacagatgggggtggagttgggggagcttggtattcaggtggcacaataccaggtggaggttaaatacctacaactccttatgcctgggatcttttgttccaatagccatagaagcttctttcatttcactttttatttttattttttgcaaaacccattagttgacaaagtgccataaactttgtacaaaatggcctcgttcagcaaatattttattcaaactatgctcctatcagcagtaccacacatgtcataaagtcatggtgaagcaggaatttcagtaaaagaaaaggcgggggtcatgaagaccgaaggatcaaaggagcatggagtagaggaggcgtcacatctgaagtgcacactgtgtgtgcgcgctgcaaggagagagagcgttataaagttgttgttttaatcgctgcttgtcgcctgcgaacatgttgctcccttttaagtgtcaagcaacgggttcacccaaaacttttctgcaccgaggacccgcacgcccggggtcccacctgcccctctctgcctgcctcccaccggcgcctgggcatcctgcgccggctacaggtccttgctcactgaagcgtcacctctcactccccagtaagcctccgcagcccactcggactgcagcctgtttgccgcccgtcctcccattgcagcactcggggcgacagagagggaggaggcgcgcggggacggggacgcccaggaggacccactcgcgggtcccgctccgctccggcagcagcatggggaaaggacgcgcgggccgagttggcaccacaggtaaacaggctggcgaggcgcaggacgctgtcgccgccgcggccacccagcgatttccaggcacgcaactccgcctccagggctctctccctcgcgctctctcccagccgcttgctcgcagccccagcagccgccgcagcatcacttcacacaaaggactgtcacccgcggagcagctcctccacctccacgtcctcctccggtgacagcagccccgacagcagggctcgggcgcggcggcggcgcggggggtggggggacctgtcactccctgtaactgaggcggcggcagcggtttttttgccttttctattttgccttttttttttttgcccttatacctcttcgcctttctgtggttccatccacttcttccccctcctcctcccataaacaactctcctacccctgcacccccaataaataaataaaaggaggagggcaaggggggaggaggaggagtggtgctgcgaggggaaggaaaagggaggcagcgcgagagagccgggcagagtccgaaccgacagccagaagcccgcacgcacctcgcaccatgagatggcgacgcgccccgcgccgctccgggcgtcccggcccccgggcccagcgccccggctccgccgcccgctcgtcgccgccgctgccgctgctgccactactgctgctgctggggaccgcggccctggcgccgggggcggcggccggcaacgaggcggctcccgcgggggcctcggtgtgctactcgtccccgcccagcgtgggatcggtgcaggagctagctcagcgcgccgcggtggtgatcgagggaaaggtgcacccgcagcggcggcagcagggggcactcgacaggaaggcggcggcggcggcgggcgaggcaggggcgtggggcggcgatcgcgagccgccagccgcgggcccacgggcgctggggccgcccgccgaggagccgctgctcgccgccaacgggaccgtgccctcttggcccaccgccccggtgcccagcgccggcgagcccggggaggaggcgccctatctggtgaaggtgcaccaggtgtgggcggtgaaagccgggggcttgaagaaggactcgctgctcaccgtgcgcctggggacctggggccaccccgccttcccctcctgcgggaggctcaaggaggacagcaggtacatcttcttcatggagcccgacgccaacagcaccagccgcgcgccggccgccttccgagcctctttcccccctctggagacgggccggaacctcaagaaggaggtcagccgggtgctgtgcaagcggtgcggtaagttcctcgcccttgggggcgcgaacccgcggcgaggagggcgcatcccgggcgcgcgggcagcggggctcgacggccgcccgagcaaggcagaggcgctctgggtcccagttgttggtttcagggtggtgggttctcagcgatcctcagagagggaggtttcgctttctccagcttcccttgtcttaggctttgccactggagaaagcccaagtttagtcctgggttggggcctcctgaaactttttaatcctttggggtttggctcaccaagtagatcggaaatgtgccggctgctttcttgtgggtgatatgaacttggctttggttaggagttgctgattctgggcctcctttgaaggaggaagggtgagtcccgcaggattttaacgccttcccttcacttggagtccagagtgtggagatggttaggggtttgcttctgtgtctgtgaagtctctgcaaggaaggggcagtgcactgacattccccgacagatgtggcagagttttttggcaactcaatgtccagcagagaggtgcagtctgtaccttgtgaatatgtgtaatatgtgagaattataaagttgttattggtgggggtttttttttttggccaagtcatctcaagaaattttgttttcacaatattttggtttggaggatgtttttgcacttcactgcatcagaacagatgaacgaaattatggaatatcacatgtaggccctgaagaagaagaattttggaagtttagcaattatttgctacaccttttcccacttaccactgaaaagtattcttcccgggtctgcttcatatgatcaggtttgagaaattagctgattatctcatttcgttgctgaggtagcattatgtttatgccattcataaactaatttctatgatctaaatatctgtataatttcctgattactatataatcactaacacatagcggggtttcttctcaaacagtaaattaacacgattacacatcacaaattccaacatgcataatagcttttccccctggtctttatgtatccgtctaatagacgtttgggttaattgaatttttataaaactcagcaccatgccaagcagagtctgcctgtgatggagagtgtgtcagttcttttaaatttgtgtctggtgggggccaattatttaaatttctggttggcatttgtggtggttaagtcctgctgttaattaatacctgatgatttggttttaatgacagcaaagatcattgttcacccaccattcccttatctgaacaatgtactttgtatgccagagacctgttaggattgcaccactcagtggacagaagctgttcagagagtggtgctgaagaaagctaagtggcatagggattccccgagacccactgatagatgtcactccaaagcatgggaaatgctctgctgggagctgtcttattaggcaaccgaaaagctcagcaccatcgtactgcagcatatgttactctgttacagaatctgaaacaaaaccttttaagcaacaccactgtccagttttcatatgttttatagtgtgtaattcaggaaggatttttcctttatcccaagtcatgagttttgaatcattcacaccacatggtgggaagttaatataaaggggattgtagttagctgtgatgcctaggattgggggtgcattactacattatcaattgtgttagttataccttttaactagaaataaatgtaagacttgagaggtaaagttcttacaagcatccagagaatgtttggaaatggaaaactcatgttgtttggaggaatcatattctattcttgtgcttctaaggggaaaaaacttcattgaaggtacttagttttgtccctcagtttgccagtcaaaagaaatataatacatagttgtaagttgtggcacgttttaaaaaaatgggtttttaatgagctggagatctttttgcatgtaatcgagtatgttaagaaatcacaaagttactgccctggatttctgtagctattgtgtgtgcttggcgatttttgtgttatatgatttaaagtaggatattgcttttaacctcaaatagatttagctaagttctaactgaaatcatgctaaaagtttctcctcgcatttttacaaacatagtgtttcttgtaaaactggaggataaaagcaaataatatcagctattttatatgatgtaaattcagtaaatctgcacttggaatattgagtgtaaaagtgtgtgtgtgtgtgtgtgtgagagagagaatgaatgaatgtgtgaattcatccagttgtgtggtgtcagataatgccattcagaatttgccaggcaaagaaacacagaaaaatggaaaagagagagagagagagaactagcaagaggaaagaatgagaatgagaatgggggctgatttgttctggttgagctgcttctggtcagaagatttcagggagagtgatggagcagaaggccctcacctaacatgaagctgccctgggggcgtgatggttgtgtgcaggcttgagccataatgctaggctggagaaggaatagagcaaagtcattttgtgatatcatacccaggggaacagtttccagctctgctgctctcagctgctgtgttgtttcctacaagttgtttgctagtgtagaaactacacatgcaacagattagccttagggttgagttaataaaaatctttcctcttgaaattcctttttctctttccccctcatctaatataaactccggaataatgtcgataaaacaagaagctctttgaaaaatggacctttggaaacagaaactatgagtgtattttagaagacaacatggaaattcatagcttaattgctttgtagttgaagtttgtataaatgacacttcctttacagttatttaaagtgtttgtagtcttcactttttctgttgctcactgaacgacctaagaaatatccttgggttttatgttcattggaatgcaggataatttgctgtccgattaaatctctattattcaaacaagtcattgtttgatgtgctacacttttagcttccaaagcattgtggttatatgaggcagaagctgatttccaaaaaggagtacaaacactgaggttgaataacatctacaattgggctatgccagatttgtacatcaattctgatcttacaagccaatataagtattttatatcatatgatggtagaatgaagatgtatacatgtatgcatgtattgataatgtaaacatctttatcaaatatttatgatacatagcacttgctctttttaatatcttcagtcactatttaataaagtgtgctaaccttatggtgttttgaaaatgaaagaaaatgctgcagagattttccagtcagcattaaagaaaactattcttaataaaagctatattaaggaaatagaaacagtaacagatatagcctgactgcttgtatgttgtaaatacacatgtaaatttaatttcccaagtgtttgtgactgctctttttaaactttataaatcttgctgtcaaaaatctataccggatttaaaatagctacttctactgagtagagaaactatgtatttatttatatgtatgttaaaaatgaaaccaacataggtcatttgggagaagaactccttagaataaaaatattttaaaaagtggatttaaatatctgagttagaatatttcactagcactaggggatcgttcttgttgttgtggggtatctataaatcctctgaatgtaggraaagtcttaccatatgtcctgatgtattaagtaagactaggagctttagacaacagagaattaaaacagtgagctgtacttcctctggcttgtatatttatagcaaatgagagcaaaagatgtgattgggcgggttattgcccttgtcaaatataatctattcattcttccggaaatctcctttgcttcgatacctattttcttcctgtttttttttcttaattataaacataatgtcttttacaaccctcttgtacatttcaatgacaatttatgaactgcttagatatccaaagatctctaaatcctcatagcaatacttagccttttatttgttttaaatatggttgaatgatctgaaaaaataatctcttttgatagctcttaatgaatgggtattttgattagctttgtatagataaatgataatgaaaacaaaaagtatacaattagggttcttactgattcaagcaatttgttaccaccccaaaatagtgcaacatggcttagtgaaagtcttcataagaaagtaaaaactaatttacaatgttcttatttcctaatcacagaaatgggcattgtggacagttttcaaccaatatatgaatactctaaatttgtgcatacatattgttactccgcttttatgttataacatgtaagttaaaattactattatgaaagaatatataacctggctagtttacccccaacctctccagaatatcagtcgctttatagtacttgaacgtttgcttagtgacacattctgttgaaatctaatgttgaattatttgtggatttacagaatatacaaattcacaaataattgtatgactaagacaaaacttggtcattttaagttgagggattgtcctagttgagaggttgtgttttcatattgcctaagttgttgagtgctgtagtgcacttcaagtaaatctgtttctgaagacttgccccctggattttcgtccctaaattatccatacaggttgaagcagataaaatacaagaaattttggtgaagttgaaggttaaaaatagattgactagtctcttcttggcatagatacaattattaggaaacagttctccctaatacagacttgccatccaggcatcctagagagagatgcatatgtggtaatttacattaatttttggtcttcttcaggagaaccaggatatttttccctacggaaaatagtttgttaggaagttctttcctggcccttgatttacctcatttggacctagtaaaatttatactttgttttaaattacaactaaaaaatcaaaaagaagaaatgttacctacagtctggatggaccgtaagagactgtcctactactttctaactcagacttctgtgttttttcttttcttcttctttatttcccctatgaagatactacaggggaagccttgggtaaatgatggggcccaggagtggattgtagtgtatgagtttaggattgctagtcattatcatatggactagccttctctcgaaaccttgaaattcagctgtccgggtccaaggaatgttggaaaatagaggtcttagatcacaagactgtgaatgcaaatggtctttctgtttctgatggagtctttgtccatcccatgaggacgtggatggtaacctgcattgcatctctagttcagaggctttctctccaaagcccaaggctctgtctttggacatctgccctggcttgctgggaacaagaaaacagctctgagtggtgcatgaatccggagctagtagccaggtttatgaggtagcaatggtccaagggaacctagaggagggaattgtttccttttcttttgctctgctgtgctagaatatgtgagctgaatcaagcccagtgcaagggaacatacctgatgagggcactagagtcttggtactgggtatacctaagagcccaggggatggacgagggataagaaatgtgaagtactgtcagcttcactaaatttggaaaatgcataccagtaatactatcatcccaaatggttgtcttttatctgggaattgccattaaggcaaagatagctaaaaaaattgagggcatactaaaaccacatagttataactaccacttatggagttggtaaatttttttggcctctttgatagacacatagagtttgatttttatgtgtagattaaattcctgttgaataattaatgaataaatgactgaaggaccccagctggttggatagtggaaatcactgttctagcctaaatttagaaagataaaaacatacttttgatttttttctcttctcatctctgatatggtgagtttgataccaggacactgttcccttctcttcccatccagagccttactgtaatctggatcgacctttggggcttcagagaaaggttgtttaatttcccaaaacttttccctcacttatttttagaacaatatttgttctgtgtagcttatagcccagcaggaaaaaaaaattccagtgttgtaaatgcttaaaagtacagaagagttttgctgtagtctatgaacccttaccactgttttcagcagaaccatttgtaaaccatcccagtttattttgggtgacagacttcagtattcagaaattttgtgttctccttggatctctcttcacaggtgtttaaccatctcagtactgtaagtgatactttatgttgaaattcattctcataactgaagatggaaaaacacagcttatatccctaagaagtaatacaaagaggttttagatcagttcctctttacttatttttcttgtttccaatatcacaacagctcttggtttacctgcaggtggggtggcatgtgcccatttgggctctgatgaataatgaggttctttgccttcacttcctcagtcggccctggaggcactgtgggagatgatgtgttatcagtgaagcagcagatgtggtggcagcattttcctccactgcagggagcatcccgtctgtacctctgtacagagcaggggagctgtctactgagaaggaaatggatggctgtgtttgcttcacatagaatttctcattagccttgggaagtggttctggcagttggggccccttggtggttgccaggatggagaggttctgctcagagtgggtgtgctcattgtcctgtcatctgcacaaagggccacagcattgagataacctaggcatgctgctgctttgcaagcccggacacctccggacaatcctttcctctgttgtcttcattcccatccatagagatgggtcacatcttgtcctcaggaacactagcacctttctttttgttggagcagaaattttataaaacaccctagcattttggaatatagttttattccgatgagcagtttagaaaaatttatggtaacataaaatttaccattttaaccatttttaggtgtgcagttcagtggcattaagtatttgcattgttgtgtaaccctcactgcaatccatctccagatattttatcttcccaaagtggaaactctgtattcattaaacactaactccccattccctttcctccttttccccaatcaccattctactttctgtctttacaaatttgactaccctttttttttttttttttttttttttttgagacggagtttcgctctgtcgcccaggctggagtgctgtggcgcgatctcgactcactgcaagctccgcctcccgggttcacgccattctcctgcctcagcctcccgtgtagctgggactacaggcgcgcgccaccatgcccggctaatttttgtatttttagtagagacggggtttcaccgtgttagccaggatggtctagatctcctgaccttgtgatccgcccgtctcggcctcccaaagtgctgggattacaggcgtgagccaccgcgcccggccctacctttcttaagtgtagagttcagcagtattcaatacattcgtaatgttgtacaactatcaccatcatccatcgccatactcttgaccttgtaaaaccaagactctataccaattaaattacaacttctcattttctcctcccccagccactgacaaacactattctactgtttgcctctctgatttttactaagtgcatcatttaagtggaatcatatggtatttgtccttttgtgactggcttatttcacttaccataatgtcctcaaggttcatcatgttgtagcatatgtcagaatttccttcttttgaaaggctcaataattttccattgtatgtaaataacacattttgtttattcatccatccatccatcagtggacacctggtttactttcacattttggctattataaataatgctgctgtgaaatgtcttctcaaatccctgctttcaattttttgggtatatacacagaagcagaattgctgaaacatatggtaattcttttttctttttttcttttcttttttttttttttgagatggcatctcactgtgtcgcccaggctggagtgcagtggcacgatcttggctcactgcaacctccacctcctgagttcaagtgattctcctgcctcagcctcctgaatagctgggagtacaggtgcatgccaccatgcctaagttttgtatttttagtaaaaatggggtttcaccatgttggccaggcaggtcttgaactcctgacctcaggtgatccgcctgcctcggcctcccaaaatgctggattacaggagtgagccatggtgcccggcctcatatggtagttctaggtttgctttttggaggagctatcatactgttttccatagcagctgcaccattttacattcccaccagcagtaaacaagggttccagtttttccacatcctccctcacacatgctattttctactgttttgatactagccttcctaatgcacgtggagtagtggtgagcagtttttatattgttgttgttttctatacagagttagtgtctctaattacactgtcattaacaagaagcaaaagttctcagaaaagagaggtgttcatttattcaactcttagtttaaatagcatgtaagatcctgaatctgaaaccatgaaataaggaaattacaatggataacagcttaataaaaacaatgatttaaagagtaagcttagaaataaagaattgagtaagcttcgatttaaagaataagcttagaaataaaaacaatgaaagatgtaaagaataagcttagagaatggacttacagaaaacagtcctccaaggtcatcatgagaatattgtatttttattcatattgctatcagtgtagtccagaaaggaaccttatcatactttgattagtttcagaaccttttaattgatttaatgtattcattaattgcctctaccccagcaatttccctgtctgtattcctgtccattgccccaatccccttctaatcagtacgcaccagaggctgagtcattctaaaatactacttttttttttgtttgtttcagacagggtcttgctctgtcatccaggcgggagtgcagtgggacgatcttggctcactgcagcctcaacctcatggactcaagcagtcctccacttcagcctcccaagtagctggtatcacaggcccatgccactatgcccagctaatttttgtattttttgtagagatggggttttgccatgttgcccaggctggtcttgaactcctaagctcaagcaatgctcccacctcagcctcccaaagtgctgggattacaagcatgagccactgcacttggcctgaaatgctacttttcttaggccttgttccctacttagaaagtttcaatggatgcaccatagttaactcaagatctcaacattcaatatcctccttagcctcaataaagccttatctttctcaccttcccatatgaacacttcatccactctgactgctccctgaacaggccaggcactttcctaaccctcctgtttttacatatgccatttcctctgcctcgatcttcttccaccctcatttctacctgtggaatttctgttcttccttctagggacagctcaaatcctactgcttccataatgaaactagtaatgattcctaccagggatatgcactctagaatttgaacacagagctcctctttcctgtgtaccttacacaaggtactgttacaaattttccttctgtcatattgtgtttgttacaatgtatgtattttaaaatttttctctgtttctgtgtgtcttgcctcactggcagccaacactattcttgtgtttggatactagcagggtcttcagcttacttgccagtgaaaagtgccctggcctcgagtcagaagaatcctttccactttcagctttgtagttagtacctgtgtgattgtgggtcgctgactttattcactcatttgggtctcagtttcctaatatgcaaaacgagaaggtaaaatgcttttcaaggtccgtttaaactgtatttggtcctcagaaatgacccaaacatagaaatctccttcttctggagctttttctggagcttattttctcttcctctcctcttatttagtgttgttctcaggagaacacatgtgggaaaacaactgtgaaacttttagacactctaagagaggagaaagagagctgaatgagagggaaccttcaagggaaggtgtctcttttctccaaatcttatctccatggcctttttgtgtcatttaaaaaaatattaacagttatttgcattcgctggcatcgtcttttcaaaaagcaaatatgattgcctctgcaagcctgtctttgaaatgataaagtatgattaatccacagctgtattctttagaatgagaaagttcagtcatttgtggtgctaaaatgaaaaaataaagatttgaatggttttactatttactgtgaatttatttttacaatgtagatggggcattgttttaggttctaataattagcactgttgctgaaatggatgaggtcagcacagagagtgtggagagcttggttttcaggggggtggcagcagttctaatggctgcagggcgaggcttcctgctgagatgccagtgttgggttctttctcaaattatgatttttatggtttgggcaagaaaaggatgcatttaagctcttttataagtaaaatgagcaatgctgaaacagttgtcaaatgggaataatttgatctgacttttacaatttctgcatgaagaggtattggcagctccatggcattggggcaggatgggcagggcttagctgggctaggtccattttttttttccttcagtttaacgtctccgacccctggtggattcacctactgcagaagagccaatgctgcttataaattatgtttcctcaatctatatctctagcccagacctttctttttggctctctatctgaacatctaactacttacctggtaacttatgtcctacaaacactttatgtgaaatattttaaccagtgcctcatctccactgccagtccctctgcacatttgtatcctaataatgactctaccctcactgctagtatgatcaccacagttattcccagtgacttccttggtcgacacttatttggtgccagagtagtaggcgctgagataaattcagttaacccctcaccatatggcagcattaatattttttagttacctcaaaccagatacctctcctgctccataccagattagtgaccacatcccactgattctacgtccttaacaaatctcagattcgtcccgtcttccctcacttcaacttctctgtaatagattcttactgcaactgtaacagcctctttatgcatggattctttccttctcacatccattttctatactgttgctagagtggtctttctaaaatagaatagatggtactgtgcttttacctaaagcttttcggttgacatcaggataaaactcagacccctttgaatggcatgtgagggcttttggcttttgtcccaagtgttcttgtccagttctttctcctatccagaaccttgtgctacactgatggcattctctacatatgccaggcagctttagggctctgtggatttgcacatattgttctcttttcccagaatggtctgcttctctatctacctgtttgttgtactgtcactacctgtcatttcagattgactgtccttccgtggaatggttaaataacactggatagccctataacggattgtgctatagtctttacaaatcttcttgtaggagaaaatatgatgacttagagatatgtttatattacattgtcaagtgaaaagtgttgtataatacatgtgtgattgacttttctttctttgcttttccttttcttttctctttctctctctctgtgtctccctttcctttcttccctctttctccctcccttcctccctccctccctccttcccttccttcctctcttctctcctctcctctcctctcctctcctctcctctcctctcctctcctctcctcccctcccctcccctccccttctctcccctcccctcctctcctctcctcttgtcttcccattgatctttcaataaaaataaaagcctagaactctatgtagctaaacgttaacagtgtttatctctgggtattgggattattgatctttagaatgatcttcattttgtattttctaaagtttctataatgaatgcacattactttttaacaagaagtagtaaatgctattttcaacaaaaaatactgacttgtggcaagtactatgtcttacttatctttgtctttttagaacattgccttcctcatggaagatgtattagttagggtaggctaactgcagtaaccgatgatacccttaatatataacaagtaaaatgcgatagtttatttctacctagtgaatgaacagaacacaagatgttctggtcctgactttcccctgaataaaatctgcactaactaacaccgaggcatagccaaacctcacctccagaccaaattggctgaaataggcagggttccaatttgtgacggtcatttatttttaatggcctttctattccctgaaatgtagacaaatttgccctttgctgcctcattgcagtggaagagcctcatacctgtgtgcagagctgatgatgaaaggcatctatgtgtgtatgtgtgttgtagataaatagtgtattaactatgtgtaattccttatttcaaagtagcattttatgggtgagttttgcaataaatcttcaacgtttaatgctcactatgtcttgtttcatttgatatcactgaaaatgcagagggtcaggccacattcactctgtctctccctggcatgttaggttgccttctagagctctgtgtttcacaaatcattttgatgtagagactgtggagaaatattctcaggctttatcactgctgacttaattgagtttcatgatgcgcttttttttttttcatagtaggataaattaaaaatggctgataaagctgcctgtaaaagcaaaattgttaggttaaacctgcctggtgtattaaatgtattgataagtaatttggccaccatttttaatcacttttattaactctcaagtagttttatttccagtaacttgcaaaataactgtcattatggactcagtcatatttctctttaaaatactattgaaaagtccatgaaaatgattaaagtgccaatatcatccacctacttcctgttagcaagaattgttggtgattttgtgattagctgagtatatggttgtgctctctttgtgcaacccaggaggaaatagaaccagttcatcccaggtgaatagagataatgaatgggtttgaagccgtgtaacaggagtagtcttttgtgcatctgtatcatgtatgttattgttatgctgtctttaaaacattttattaaatattgagaagacaagatacttgtgaattatgtgtaaagtgtaaagaatcatgatacgtgtaatgtgcctttcggtgtcatctttgccatcggctgttcggctttgtaaggatcttgagttcaaggtcactaaagaacagcttaacacattgtcttgctcacaggtcaataagggatatatctcttcattaaaatggatgagaagtttgtcattactttactgcttcttggctagatgtgtggcttatgcctgtaatcacagtgctttgggaggttgaagcaggagaatcgcctgaggccaggagtctgagaccagcttgggaaacatagtgaggccctgtctgtgcagaaacaaaaaattaaatttgccaggcttggtggtgtgcaccttcagtcctagctactctggaagctgagtcaggaggatcccttgagcccaggaatttgaggttacagagagctatgattgcatcactgcactctagcctgggtaacagaataagacctgtctttaaaaataaaaaataaaaaagaattccctgtattttttccaatccatttgcatagcctccaaatcccattcctttcccctcagatttcggcattcccaccctatgggagaaattattatagttgccattcttaggatgtttcccagataaattacaggaatcataagattgctaaacaaatgtaggtggctaatagaaaaagagaagcagtaagcctacttttttcatttacttattcagcaaatgtttatcaggcatctattatttgataggctttgtactgatttctggcttgacaatgatgaagaaattagacatgcccctttctgagctaagaagataggcaaaagggttacacaaataattatataattacagttgtgctaagcctcatgagggaaaagtacaaggtcccagccaggtgaacatataacagaagaatctatcttagtctgaaagatacaagaaggtctttttgagaaagaagcatttctgttagggtagggaggaggggaaaggaggagaggaaagatttgcatttccaaccttggggcagagaaggtgaggaatagcagaaaggacagtcagcacaaaggaagcaaaaatggggtctgagaagtaaggaacaatcagacgattctagacttccaggattccagattttatcttaaaaacaggggaacccaatgaagggtttttaagaagaggagttatatgcttgtcatttcaaaaacatcacaactgctggttataaggagaatggactaaaagggaataagagtgcatgcagggagctgaggtggggccccagttgagactggatgtgtgcctggactagagtgggagctacagaagtgaagagaagtgaaagatttgagatgatttttggaagcttcttttagccttggctgtgatggggcaatgcctacaaagggcggtggggaggatggcccccagtgttctggcttgagcaaattgtatgcacagtaggtgatgcgatggcaaatactgcaggagaagaagcccttgtttagtgtattgtcgacatatccacatggaaataccaaggaagcatgtgcttgtttggagctggaggtcagaagagaattccaggttgtcttttgagtgtggtggttttggacaaggacatgacatttctagctccatgaagtagataagattgcttagggaaggtgggagagtgtaaggaaaagtgaagagaaaaggaagcataaggaacagccacctttaaaggtgaggcagagtgatgggaaagaagcaattagagcagtgaaaggaagacccaaaaaggattcaggagggaagagtggctgctgcatctgtgtccctcgaacatcctgatggaagaggaggaagacagagcccaaaccaggactttttgagtggtgactattgccacacattttaaatgtaagagtgcacattgcatttaggaccagtgaggacttaggacagagttctggccaatgccagaggtggagcccagaccaggagcagactgaagtactatttgccaacttccggttaagattgggttttagtaatatttttatttatctggacataagtagcacaaagctgttttaaatactctgaggctttctttggtggtgggggataagactgggaagaataactaatttgagagacccaatggatagtttgtataaagatatgattttcaaaaaatcatcaaaattgattaagtgttactaacgtgttgctgaaggtcactcgtttatgtgtttttctcctgagctaagaattctttcctatgtaccacctaagccctttcagtgacaaattattgttcaaatttttcttggcacactgacttgagaattaactaccattcatagctggtacccaggtcctatgagaatacaatgccttgtcacataaatacttgtgaagtgacatctatcaatctaatttagaaaaatatttgagtcaaaaggtccttgaaccatgtattaggttgacacaggagctccctttatctgaagctgtgactgagcattttaatgaatggcagtcaaggaattcaaagttattattctgatagtaattgcgtgcatttttcctgcccatctatatgcagccttctcattgtctaggaagctgctgatttgatgcattcatagctattatttgcatagggaatttgaaccaccatgggaagaatgattttgaatttcctgttttcatttatttactttgggtgcaataacagtgttttcatggaaggattttttatattgggtttttcctaattttaatacagtgtaaataagctaagtgttatatttctgaaaaccacacgttacaaatttttaaaaatgggggaaagatgaaaatgaaataaaaagatgggaagacaagttctgaaacctctgaccttacctgcgggctcctccctctagttgaccatggagaaccatagatgacttactgggccagatattctgatcttggacagaccaatggtttgtaaaatgggttgcatattatagtgtgcaaattcctggactagacttccagagatgatagttcatgtggcccagggtttgtcctgagaatctgcatttttgaaaagctctccaggtgatttttagtgtgcacttaagtctgggagctcttggaattgtttttttcaactaataaagttgaagacaccctgcacaagattagaagatggataagaaaagagaattagaatttactgagtttctattatggctgaacatgtttacatatcttacgtcatttattctttaacaccatcttgcaaggtatatcattttgttccaattttaacctgagattcaaaaaggtttacagaactttaaaggtcatgcagctgctgggaggcagaacctttatttgcctccaggtcatctgatctgctgtgtagaaccacgacaaggctgggaacaagaaggtctggatagaattctagtcacaccatcacttgggtgaggtccttttgccctctctgccaacgtgggtacctgttgctaaaggtagactttcctgtttatcatcaaagagtgcctataggtagatgagtggggaggactgcatacattttgagagtagtaaaatcagatccacttggacaaaactgtcttcaatattctacaatgaacatgccatgttattgtgaccagaattgacattgtatctctaccctacgctgacaagttgattgtctgagcgaggaaacagcactcatcatacatttatatttctccaggaaggaaaagagacatggtagagtctagtggggaaaaatctggcttcagattggacttagtacttgaattaagggtcaggcattggcttctacctctcactctgtactcatgaccttgggaactccatgtttctaaactttatttttagttttctctttgtaaaatgagaatgatgtgtctctctcagatcagtgagtaccagctgagatcatgtctgtcgagcacttaggcagtggtaagtgccttctttctttctttgttttgagacagagtcttgctctgttgcccaggctggagtgcagtggtgcaatcatggctcactacaaactctacctccctggatcaagcgattctcgtgcctcagcctcccgggtagctgggattatagacatgcaccgccatgcctggctaatttttgtattttttgtagagacagggtttcactgtgttggccaggctggtctcgaattcctaacctcaagtaatctgcctgccttggtctcccaaagtgctgagatgacaggtatgagccgccacacctggccacagtaagtaccttcttaatgttaatcagcagagggaagggagagtgactctctgcagcaggattcagtggagctagagatccagactagcaatagcagcagaatgaagatgaatcttgactacttgattgctgcatttttcattattttaggaacccagcggttctcctaaaatgcatgccaaaggtcctttgacagggtgctgctccagctgtggtttgtcggtctgcagtgttgtaccaccctggtgctcattaggactgcaaattcccaggtcaccttcagatgtaccactctccagatgtttctcatgctcactgcagtatgagaagcactactttaacaggcaacctccttccaggtgaatcatgtctggagaagttgcttggtcagagagatatttgtccaggctcagccatgctggctctgcagcgagggttccttcactagaacaccatgcatttgtggtggcagcataggtagaaggcactgagcggaaacaagaggagcgagatggagaaagaaaaaaaacaactttcccggaaaagttaaaatgatagcatgacctttctgaatggactttgggacatggcaccaagaatgagcaataatgaaataccaaggaaggagactccttaggagagcatctgggaaccatgcaaccatgcgacaagaggtgatgcagggaagctggtgagagggtgaactgaggctcccccaggggcgaggggggatacctcctttctgaacctcatgctgaacccgaccctcaggagcaacagattggggtaggagcttttggagaggggaattgaaatggccttgttggcagaatgactctgaagggaactttccagcacacccaggaaaaaaacaaaacaaactccccaatctgccagactccactttcttaactggagggcagggtggttgctcaaatattttgggctcagggctttggaaagatttcttgtcttgctgcatgctctgtggaaccaggctgagagcaggatttttgcatttagaatatcttagcagaactgggcaagatgaaaaccaatctttttgtagctaccaaaaagtggacatacttcagctttctgtcttctccctgctgacttgggtgtatttggtgtgcttgctctgtgctaggcccttcctgtctcttatctcactaaatcttgacaatatccccagagattggcatcattatactcattttacagatgaaactgtctcagaggggttacggaatttgcccaagacacacagctgagtggtgaagctggaattcagaaccaagttcggcttattagaaagtattcttatatactacatgtagaaatgaaacgcaacgtatgtgacagccattataatgtaaataataaaagtaacaggattttctccctgccctccgtaattcagtatacttgttgattatttgctgcttctggcaagctatgattgattgctgttctgtgggatatggagaagtttgaggaatttatgatacagctggggagaaaagacatattgatgcttgaccaggattaagccaccatatctcacaggtgtttagacaaaggagaaggcacctctgctaaggcacatcagggaaatctctagggaagatactgatttgacatagtactttctgggtatatagaattgtttcattttgtttgccgagtatgttaaaactgtttgcagggtgtgttaagatgatttgcagaagaatgttgcatatattattcgttttgatttggaaaaacaattaaaacaaggagagtcttattatttgccctatctttgggtaacttctgtactaacaaaactccggctcaccagccactagagttaaaattctcactaaagaaattgactaaatggaagagaatttatttctgatttcctttttaatgtaaacatatgtattgacacttttccttggaagaagtgtagtttctcttttagtagaaggaaatagaattatactctggcttaaattctattattataaacatacttctgtttttatcttgagataaggctttcctatatactgttgggagtctatagtgatatagtcattttctatattatttggccatcatttattcttttaaattcatttataattgtttttgcatgttttattgctaacatttaatagtgaccacccattaaagctattgcagtacctaagtatttataaatttttctgacatgttattgcttctggattataaactgggaaataattaagattcttgttcttgttgtaatgctgttatggtgatgatttagtatttccccaaacagtttatataatatggtctttttccacattggtatgtttctttatttgctggacagggtattttaatggttacatctaaatggaataaactcatagagctgttgatttgagaaaaccttctataatgccatattaatctatttagctcccagacctttcttagcagatcaaaggaatttcctggccactcccagaggtctgaccgccttttatctgttttaatgaaggtaattaaaattcctcagcttatgaaggtctggtcctggtcctaagtgaactagtccccagcagaatctgaaagaggactataagcaagccatttatttctaaatttttaaccttatatttctgtagatcctgattaaggtagttcctgcagtgtgagggcaaacttaggttgccagtattttagggaaatatgagttcttctttcataaactctgatgattattttgattcctgtatcattcatttgaaatgaacctgcaacactttgtgggtacataggaatgaagcaaatgcactctaaataattaaccagttgtgtcattgatttctactgataggtttatagcaaatgactttacacaaagttattaattaaatgctgtgttctgatgttgtctaaaaaatgtcatctggatgtccacagtttaaatcctcaacaaaatgttaaaagtcacagaaaaagtctttgacatagcatgacttaggatctccatattcatagttatttgttgagtaaatgtgctttgagcacttatcatgagccaaacactgggctaggtgttacagagacagtgctgaacaaagacctcgccaatatggtgcatattcccattttacaatctgtcagctcagccagtctcttaaaggccatcttttcctcaaacgagtttctgaaatgaaaatgaaaagagtcatttaaggatttaatctgagttctagtctataccctgaccacacaatgggcctcagggagaagaaggaacaagacaataccttactagagcaaaatgacttcccattatagaacatggtctggcactttcaagataaatgaagctgtaaagttaagttgtgcaattagtggacagagacaggtaatttgtgggcatggaggaggtttccaaatattcacagcaccaagtgatcaaaagctgtaagtagcatttgtgcacttttcttcatacattttacattaagaaaaaaaccatataggttgatattaagcagctaactgaaaatgaactgtccttaaaaagtaagtaaataaaaaacagcacttttcctgatgaatgaaggactgtgaaaaagctgttatgggcttagcctatgtagttcccagcattattttaaaaagatgaagaaaagaatgttgaagtctttgcattttcaatgcctaccaggtgcacctgccactcctgcatttctgggtttcacttttgtccattgctagctctcatttggtctgcaaatgtctgagtatctttcatgttccaggaactgtttgtgtgagatagatgcaatggtaaataagtcaaggtcgtcaccttttaggacctcatcctaccaacttaataggtgctagcagagactcgttgtgtgtctattataggataagtgagtgaaagtcctccttaggtaggtttcatcatctgcacttggatggaatgaatttatgaatgttcttagagacacttatagatctgagaaataaaaaacacataccaagaacttattgttgggatgaagaagagtaaataggggaattttttgggttcctcttctcctcatcctccttacaactcctcctgctgataagatatttagtcctatgattgacccagactgtcattttttggggcccttctctccatgcctgtggccaagccctgcctgggcttgtattaccagggatgactccacatgcttcttgcctgctattcacagaaggccctcttgtcttccgtgctcactgcgtggatggaacacccaggcaatgggacaccaggggtctgtatgtgctgcctgtgccagtgttctgagaagctccctgagactggtttggtgtaagggctgtcagtctgctccacaaacccagaataaattggattggaaaagtaggaaacctcatttagcttttgtgcctaaactttgtatacccaagcactgtttaccaaaaaagttctggatttggaagtagttaagtattcaaaacatattcaactatttatgaaaatgatgcttattattctatgtttatttctctcagcagggaagcccaaagagtaggggagatgaggagtaggttgtggaatcaacacccttcctcctgcctccaaaccacctgcactgcccaaggaggggccattcttttttgggagcccattatgtacttagctgtggatgagggtgtatgtgtgtcttatattcctgcttacattatggatagaagattgaaggtcacacttctgtgggtgtcctactgcacccaaaagggtattttacataaagcatgaataattgcaccttttcccccaaatgtcatatactttgatataacattttgtagagttaggagtcaggctttcatggggaagagggctgggttatgtccagttaatgggcaggcatgtagattatactttgcttttgataggtgagggactctttcaagtactattctacttcctctgtggttagtttttttctcccattcttctattctttttcatctttggggctgtacatcaggggaggagggtgctgcagtttgctattataatgggaaaaaatgagagagaaagcaaagagagtaggtaactgtactcagctttatttattttatccacacctcaagctcttattaggaaagggtgggttcttcttttctttttttttaggggggcggttttcttatagaataattactggtattctctggttgataagctaagagaaaagagagtcagggaaaagtactttactgtttttctatgttgtgttcattggttgtttttgtctgtctagtaccaaactttccaccaaccacataccctcttcacggttcccctccttccttctccaacagggaaaggcaggcaccagtggattcctctgtagtcaagacttaacataaccaggaattcttcctaaaggaagaagctatcaattagctaattatacttttcccatcccaaatttgttggacttctttgaagacaggatgatttaaatgagtggagaaggcttacctgggtggagggaagcagggagtaccaacgcatagagtgggaggaaggttggaaatatgagtgagagaaggtgttgatagtggaaggttgcagagaagttgtctgagaacttattcagagccagatggaggaattgttctactgattctcaagaagaattgagagttcttgcagcaattgttattatgtggttttgcaacttctctataatctcttataagagtagtttctcttagaagcctagtcagtatacctgaaactttaattccacttaccattataatgagaaaataaattgtcttattagattctgtgcaccaaggggcaagacctgaaaggaggatggaacggtgtgtagcggggatggcagttgatctgcaaaatcaggcatggaaattctgaactgttattggagagggaaaaggaacaagctacagttaactggtaaaactcagtcatattataggttaatcaaggccatagactgtgtgcttggtactatggaagataaagtgatatggaaagcatgatcagtgaccagtgggcttgtaatctaaatgtggagacacccagaccttagaaaataactatcccataggattatttttggcaaaatgtcaaatgaacaggtcatagataaatgatttaagaattcagaggaggtagagctcacttctacctggaagggtaagaataagcttttgttgacggggagaggctggaggtggaccttcaagggtgggtgggacagagatttgtcagcagacatgaatatggggtgctgggttgggcactttacacatcacagtgtggatacaacaccctggaaaaaccctatcactcccattttagagtaaggaagcataggctcagaaagtataaatatatgacccaaacttccttaaccattgacaggacaagttatagctgaatttcagacttaagccctctggctccaaacccatcctattccagtaccagtttgcctttatgaccttctatacacagaaatgctctgagaacaagaaagcaagtattttgcacccaggatggaaaccacatcattttggtaagggtacaggtcatttgggaaaaaatgagtgatgagtttaaacagtggtctaggtttggaaaaatagtctagaactattgaaggaatttcaggcagagaatgaggtcagccaaactatgttttagagagaagagctgcaaaaggaatgattttgtagaatatggcaaatgtttatttaacttgtagcattttaaactagattacttttagcttaggtctgcatctgaaaatcagtgatttacgtagtcaacctttatgaaagttttctttgattagtcaatctagaaaagcataggctttattttttttaatttttatttctcatgcttgtgttttgttgcattgcgtttatcctggatgccttaatgaaatggtgcgatatgacccagggctctcatctgtttaactttgctaatttgctccattttcaaatgagtttccttggctgcaggagcagcagcagagcatgaactctgctgaaaggaatttcagttacaccgctactgccacctctggggcccccggataattttcttatcgtctttttgccgtttgggaacaaagccacgttgttcacgactgaaatacagtttttaaatgtgcctcctaccgtgtttttatagaaagagagcctcttctcctggaaaataaaacaccattgattgaaccaacagcccttcgaaagggctttaattattgcattaattacaaacttcaggacaaaccagggcccagtagtagggagccattgagcagatttctgagcggctttaaagaaaatgttaaaagccttttagatctaagaggctgaaattgagagaaggaggtgggcatgtgggagacactaccttcttcaagttataagctttgcattaaaaaatatcctcttccctctctgatttgtgtttcctgggaaagctccaatgactcattgctccaaggcctcaacattttctaccctgacattgatgagagagaggaaagtggggaggtggtctaaatgtcatagagtagaacttctccaaaaaaataggtcactggggaaaaaagaaatactcttggaataatcctttaacatgatcatcttcaaaatgctcactttttattctgaagaaaaagaagaaagaaaaaaggcaagtaatttctttctctggcaaaacattcactgaggtgttttcattcaattactttgatggttggctgttgggaaaattatcaaaagtgaatatgggtttgggaactactagaagattctcaaagttgctttttatgatctctttcccagggaaaataaatcattaaatactgaggtggctagatgaaattgaatgctacatctcatggtttattcagaatgggctcttccatctgacatccttttgacaggttctaccacatgtggcatttctggcaggtatgagggtaggtttcacattctaaaatgaaactggcagtcacacgtttccctggtttaaaacattttagcacttattatgtgccaaatagtgctctaagctgtcaacatgttaactcatttaatccttacaacaattttgtgaggcaggaactattataactatttagcagataaggaaactgagccttagcaaggtcacagtggagagcaggctgtccggctccagtgtctacttaattctaaccgaatactctgggagacaaagacgttcgtctcaattcatatcaccttgaatattcattgccagttgatgattgttattcttaattccctgcaaagactcaaccagtcaaacaattaatcaaatactgatttaccaattttctgggcacaagattaggcattaggagatgagtaaagatcccattcctacattaggagttcccaatctaatacagaagatggataagcaaatagggtgccagaggttggagtttgtggctcagatttgggagggttcatttatcaattcattattttaacaaagtgtagtgctagtatatgccaagcactgtgagtgattcccccatcccctgctcctcagtggttgcagtctgatcaggggagatggataagcaagcagcatgttgcattttggtgtgataattgctgtaattatgggcaagtacatgcaggggtactacatttgtaaatgtaccaagggaggtaatggcctgttcaggaaactgcactgtgacttagcatggctggagggtccagtgaaagcacagagaaggtaagaggtgaggctgcagaaggccccagaaagggttgggagtcaaggacattgtctgccatttcagagactctggactccattaggacattgagaatgttacttggtacccagcagtaagagttccttttcatccaagctctcatgtcactttaattgaaaagtagaaaagcagaaagaaagagtatcctaaaattaagcaatgataagacactgcaaatttccgaagattggaaattgccacttttatgtagagcttatggctattttctcgctggagacagactgaaaaagtgaggtccatatctgtgtctatttctgggatattggctcagcaataaagatgttagaaaaaataaaatgatggggttaaaaatcaacacatgtcacattaatttctgattcttctattggaagaggatcacatttcaaggtcaaaagatggagcagtgagatttgtagagagaaaatttatgggtggatatttgaaaattttctataagtaagcattgagaacattacgaagctaccagattttgtaattttcaaaattacaaggaatgtagtggaattggataatggatggtggaacctcttattcttggatcattggtttagatagatcccagattggcaataatggaaatttatttcaattttatgtctgctcagtggctgaaatgaagtgggttaataggtgcagttttgctttttgtggaggaatgccctagtcacagaaacccctaaagcaaactggcctttatatccccccagatgtttttccaggatgggtagtaacagagagggatatctctttgtcttggatttcctttatattgtgtgtcaaaatggacagtgtacaaagagtactattcaaaagtgtgagactaatctcagtttattgtgaaattcaatggatcacaaagtactgtgtccccaaaccaaaacagatgattggaaaattgaagactagatatttggaattgcttgaatgctggaggatggtgtgggcaggggtggaggcctgggtttctggcatgtaaccctaaagtcctttttatctttagtcttgtattctacctgagtagtaggtattgtgaaaagtatgttttctatgagtttacagatacagttcctggcataatgtacagcatatagcaggaatcctgtaatcattgaaggagttaataaatgatatcatcagcatagaacagtttggctgctttatgtataactcaggctactacagattgggtatctcttatgggaaattcttaggaccagaagtgttttggattttggatttttgtggaatatttgcttatacataatgagatatagaggggacgtgatctgagtctaaacatgaagttcatttatgtttcatatacaacttatacgcatagcctgaaggtaattttacataatatttttctttttctgttttttgagacaaggtctcgctctgtcaccccaggctggagtgtagtggtgcggtcatggctcactgcagacttgaccttctgggcacaagcgatcctcccacctcagcctccctagtagatgggatgggtctacaggcctgcagcaccatgccaatgcccagctaatttttgtattctttttttttttgaaatggagtctttcccttttgcccaggctggagcacaatggagcaatcttggctcactgcaacctccacctcccaggttcaagcgattctcctgcctcagcctcccaagcagctgggattacaggcatgtgccaccatgcccggctaatttttgtatttttttgtagagatggggttttgccatgttgcccaggctggtctcgaactcctgggctcaagcaacccttccaccttggtctcccaaagttctgggattacagacatgagacactgcactcagccttatacaatatttttaataattttgtgcatgaaataaggtttgtgtacattgaaccatcagaaaaaaaaggattactgtctcagtctcccatgtggacagtctgtggttttttggcatcaccgtcactcctgactctgaatttatatgctactgataagctttgtgttcttacacttattcacgcataagtacttaacagtaaaaaatatgacatgcatatctggtgtgcacagaaaagatatatcacagatgaaggaggctgggagggccttttttcccttggggacattgaataaagcatgtgtgtgcacctgtgttttgattgcgactggtcacatgaggattgggtgtggaattttccacttgtggtgtcatgttggtgctcagaattttcagatggtggagtatctcaggtttcagattttcagatgagggatgctcaacccataaacccatatagagataaggagtcttggtacaacatgtgctttatagaaaggaaaattttaggtctcagttgtagacttagagaaattcaggactaagacatttctgtgcatttagttccttttcatttttattttcctaccaccttcccccagccagctttcatctttttctctcaaagctctgcaaatcattgaaaaaattttccatgttattttttaggacaaaaacttactaaaagtcatccatccagcactgagttcttactcacgggggtcaccactgctgtgttctagttcctttgcttttgttttgttcactggcccctcctctccaatccctgagctcctacactgcaggccttcctttttattttacgttttacactctcccaacctgactttatcctttcaatcaaagatcattaataaatcttgtattgccattacctcataaaataagtattccatttaatcacattatctatgtatctgaaatcaggaagataccgaaaggtggtaaacaggaaatgggaatattggcagaaatgtactactgtacagctgagaattgtcattctctttgtttttttttttgtcgaaaataaaccttctgacagagatgatcagagaaagggatcataagtggtttcatatgaatatcaagattggctcccattacattttggcactaggtgttaagtttttatctctctgatcctgataggtggtggtacttggtgggcagtgtcatgaaaaccaagagaaccagggccttatatttcttttattttaacttgggtttttattttttttctttgcaacttttatattatgttcaagggggtgcatatgcaggtttgttacttgggtaaattgcatgttgcaagggtttggtttacaaataatttcatcacccaggtaatcaacataataaccgataggtactttttcagttctcacccttctctcgccctcaatccacaaataggtcccagtgtctattgttcccatctttatatccaagtgtactgaatatttagctcccacttataagtgagaacatgtggtatttggttttctgttcctgtgttaattcacctaggattgtggcctccagctccatctgtgttgcttcaaaggccatgatctcattttttttaataactgtaaggaactcaaatcaacaaacaaaacataacttgagttttgagaggtgttttctaccagatacttccctttgaactttgtatgtgacttcctagagagaaagtgtgttgaggaagttcactattctattctgcagtgagagaagacgacaggctaccagggaaaaatagaagatcaaaacctttttatttatttatttttgtttgtttttaaagtatctgtttccatatgtatactattgtgcaaccaattagttggggatagcggatttttatgtagctggcaaacttatcaggcagaagagaattatcatgtatatttcagcagcaatttatgaacaggtttgtttctaaaggatgcacatgtattttgggtttcactcttagtttcactctgattaatttgcttaataaatcttccttcttaaagacagaggagaggcaaacacaagtcaagcttttgttttagccagtagatttataattaatgacttttgttgatttaagaagctttctgaacaattcttggaatgcagtggtggcatcatgaaaggagcaaagggaacattttcgtgggacataagtaagatttaggagagggaggagttcacagactatcattaattttacaggaggagaaaatcaatgtcagtaggaaaaaagatacgtacaaaagatgacttctggatttgaggaaccattctcaatagcagaaaatagagctgttctcaagacatatgttaggtctctcacaatctatcagcaataaaaaaagatagcaatatagagatgaaagaggaagagagaagaaggattaagatcagctgtcaaaatgttgcatacaaaatgtattgaatgtcactattataagaggtcttactgtaattaaatttcctgtctatttggatttgctcatcttaaagctttttcagttgtcagtgtgagaaatgtttcctatctaggtgttttttcctccctgttaagtatcagcacagtgtaattcaccatagttgggtagggtggtactgagaatgtttcctacctcagcaagcctaatgtatatgattgctttttgtgaagagttttttttccatttctaccattaacaaggtgttagacacttagcttggtagtagacaaaccattagatcaatattcccagaactagagagttctgatattggcaggcattatttattccattaaaaaatgtcatattcatttaacaaagatggaatgcagatagtttcaccgaagccatgagtgtgataaaggctatagacaaaagattcctgtgaagtgaccatctggaccagtttaggtgttaggatttctgaggttcttgaacaagagctgttcctgctagctcatgttttagaacccatgtacaggaaaattgaggttgtgtttaaaaaatatggcatgtagcacaggaaatatgtgttttcagagcaaatgataacttaatattggctgaataatttgtaagaatactgatttttttgtcatataacctatatattttcttaaggaagataggtttataaggaaaaattgcaataattaaactgagcataccaacaaggaaaaataatttaactattatgatgactcatttagttggcatcctcgagtaatgaggtgctctagattaattttcctgagagcagaaatatatccctttaaatgattaagcattttatcttcatcaatctttgaataatatatttccaagatatattttacattcctttgtgtcataaatatgctttacaatgtatagggctagaatcatagtttttttttttttttaagagtttaaagaaacactgggagatcttggaaaataatattaccacattggagtgcaacattcttgtctctgatatatgaggttttgattagatgatcatcaaaattccttctctttctaacattctctaaataaaaagtcgtttatgttttaaattgtagtatatataagaatcagctagggtctttgttaaacttgcagatactcagacatcatccctagaggttctgatttagtagatttggtgggagagaagagaatccgtatcataaataatcacctagagccattctgatgacctcatttagagaaacactgattctctttccactcttgtataacagacaccattactcttgctggccacgtggtccttgaaaagatcattgctgctttaccctcagtggcattgagttgtgaggggctgatgagactaataactatgctttgatagtctttgctttctgaacctttcctcagtattacctgtcactttgttaatggtagctactgaggaaaaccagatcatcaagcttattaaatcagatgccctgtacttgtacatttaataagtcattgagttctaatcttaggtctgggtagaggcaggggaaggactgtctattttctcctgtagtctaaagtgcatgcatttagcagtgatgattatattccctgtttggaggtcttttactcttttgtcatgttctggttgttttaagaaagtcaagttttctagaagcatgacgtcagaataagtggcacattactctataaatatcttaattttcatggtgagattcatagtcaggatggtctatgactttcaaatattaaaaatttaaatataccataaaattctcctttaaagtatactgttcaatgatttttagtaaaatctgtaaatttagagttgtatgaagccaacaccataatctaattttagaacatttccatcatcccccaaaagaaatcaggtaactgttcccactcctaaatccagtcaatcaataatttacttcttatctctatagatttaccttttctagacatttcatatgaatgagatcatacagtatatgcccttctgtgtctggtgtctttcagttagtgtaaagttattgaggttcattcatgttttagcatgaatcagattgccaaataatattctgttgtatgcagttactacattttatttatccatttaccagttaatggacatttggattgtttccactttttgactattatggctagtgtgttcaaatctttgtgcagacatacattttaattctacttgagtagttttacctaggagtagaacttctgggtcatatggtaaatctgtttcaaggtagcagtttcacatgttacagttctacccgcaacgtataagggtttcactttctctacatccttgccaatacttattattattattggatacaagtcccttattggatatatgattttcaaatactttcacctagtcagtgagttacctttttactttctgaatggtgtcctgtgaaacacagtatattttattttgatggatccccgtttatctttcatctatgcatctgggtactttttttttttttaaagaggaatctttaacccaatactcatgccttcttgaggcttactcaagatcttgtaagctttgtttagtatgaagtccctagtgatacctagcatatagcacctagtttaaacagattacagatgaatattcaaagtttttgacctgaatttactgtagtcaacagttaccctaaagccttaaagattaccaaagccatgatagactcagccaccatcatgcaatggctatgtccttcgtagcatcctttcttcacattcatctttgctttcagcatatgaaggggggaatgtaggtctttaatttaccttgtactgtggggtagcactatcctttccttactccattttcaggcccttggatgcaggacccttctctgaggtcccacagaggtggaggcccagcctgagcttttacaggttttagagtaagatgtcaggacagcagttcacactcagccacatcccattaaaagaaataaaaaagtggctgggcacagtggctcatgcctgtaatcccagcactttgggaggccgaggtggatggatcacttgaggtcaggagttcaagaccagcctggcccacatggtgaaaccccatctctattaaaaatacaaaattagctgggcgtggtggtggacacgtgtaatcccagctactcgggaggctgaggcaggagaatcacttgaacctggaggtggaggttgcagtgagctgagattgtgccattgcactccagcatgggtgacaaaagcaaaactccatctcaaaagaaaaaagttgctgctgtagagttttgtcataagaacatactggctgcagtgtccataggcaaagatgaagctttactgagggctgatatactcaatacttctgcccagtccacttgagtctgtctttgcctaaatactaaattgtttgaattctcctttagttttagattttccctactgaattgacatggagaaatgttatcaagtccaatttgcaagaatgctggatttccacttggagcttttgttttcttgggcctagaaggcatctcttgtttataaaaaaacactgggcatcattgtacatgagaaacttaaagacagtgcatatctggtagcagttgatatacagtgtattattcctaaatgtagtaataacaccttacaattggaaaaaaaatgagttatagatgaccaaatgcttccataaatatgatcacatttggtcctcccatctctgtgaagaattattattcctcttttacaggtgaagaaaatgacttgtcagaagtcatttatttccaaatataggacttctgataccaaattttgtgccttttctgtagtgccatgcttcctctccaaagcaatagttgaatttctgcaattttaagaaaatcatatatgtcgtgttatattagacccgtggctaatctataagcagtcatttatattttaaatgaaatccattaatgatatattcactttctagggcttatttccatctcaagcttccatttctgattgtaatgtgtaatgttgcatttcctgtgaaaggaattccaggctttggattgtaggtgggtaagattagtggtgggtcttagagagtcgggagatcctgagcatgggaacagccttttgcccgtaagtttatactgtgctcaaagatagtctgaatagttttaggctgcctggggtcccaaggagactttatgcctcccgatagtaaattttgggtccccaaagacccaacaatatttccatgcgatcatagcttgaccccaatttatggatgcttccttcctttcttctttaatccttgacaactttcttccccaagatttcctcgtgtcagggacccagaggccattcttactatgatctctttcttttccatttcattccctatggcttagaccatttaggtggggcagtggttctcacagtgtgaaccactcatcagcagcaacagcttgttaaaaatgcaaactcaggacccaccccatatctgcttaatcagaaaggcctgggaggttgaaccctccagtccgtgtttgatataccttccaggggttctggtgcatgcgcacatgtgagatccacttgtgcagtggttaagagcaaggattctggaatcagcagccaggtttcaaattttagctctgccatttggcagctaccacttcctgccatccatttacctatatgatctttggggaaattactttcctctctagactttaatttcctaatctgtaaacttgtggaataaaatatgaattacctacatgggaagttgtagaaatgaaataaggtaatgcatacaaagtgtctcacgtgatgtctggcactctgcaagcatccctgaatgggagctttcatggttgatatggactctgaccctagtcattgcctgcacagtgcttgatgaccttcccttgcttgtctctagcagcttggcatttaactactcaattctaaacctgaatgtttgccatgtgctccattttcagtagtatgaaaatgagactagttttcacactaaaatccctgtatgaaatatatttgaaattttgcttaggtcttgcttttgttttctgccacccagccagtttcctatctgggataggacatcgcttttgataataattcaatatttaaagcctttgtttaagaatgtgtcttaagacatgtttaaaagtctaaataaacattatatcctgtctcaatttatctaccacttaaaaaatttcaagtgttttttatctatctatgtctatctattgatatagaatctatgtagggatatagaatctatggattctaaatagattctatatagatatggataggtttgatatccctatctgtggcttttctcctataacatttttctaacttaattgtcagaatctgttctctagtagaaaatccaccgatgtcagaggatcacttgagtctgggaatttgaggctgcagtgagctgagatcatgccattgcactccagcctgagtgacagagagaccctgtctcaaaaagttcatcaacatacagtatacttccaacaaatccacagtaaaatttaatgtattggatcattttcagactcgcggcagccagtccttgggctatttctatgagtctttatgtaactttgactacaaattcgaagttgtcctcaaatccactagaactcctggttggataccattcaatcctggtgatttattttacttttatttgtcagttaggcctagtacatcccttgcatttatttttcctgaatttagcatatttagactgcttacttcagaagagaatttgttttcaaatattctctttggtaaaatatacctcagaagttggatttattccctttcctatcttttattcatctatgtactgcacttatttttataagttcatctgattcttcagctggctttctgccaatgataaattaaaaaaaaaaaactacacataaacgaaaccaacaaccagaaaacccttttaacttgttatttatttatttatttattagcaacctttaaactctttgaattatgtcatgaatttcctctgacttacaagctcacagggcagcattttctaatagtgttttgttttagcctgaaataaaaggttccatggtcaagttagcataggaaaggctacatacttattctatgcccctttatcccctagcctctgaaacagtttagtaattcataattcacagtagcatttgaaacactctgagatgtcctgcatagacaaaccagattaacttggtttgacctaatttcccccccaacataaacacttattaacaatctgtgaactagtgttccttagaccacctttgtgtccattgaatttagaagttttcttattctcatttggcatagcttaatgtttttagatgtgctttagttttttcctctttacctatttgtttctatttggtttcttcacttacgctttttccatatatatttttttgacaagtctgtgtgacccaatttaaacttttctgatgacatttactttgaattaaaaaagattttttgttcattacttatcttcctatattctatattgaaatgattattttaatatttaatgttatagcatattaatttattaaagtattaaatatttatattattaaatttattttaagttaaataatcaaataatattgatattaaatatttaaatatttatatttaaataatatttaattttaactttatattgatataaaattatttaaatattgataaggatattactttggtagtactggtggttataatgtttttaactgtctttcttattcactgaatatattcactgactatttcatggtaggtttttaagctttattgcttttattagggaataaatgactaaagttatatattaacatttacatttgtaagttaatcttcaccataggtaatttttgctttttaaaatttgttgcagtactctatatttccttgcgatacttactctctttgcacatgcttcttcttttgcatgaaggctcttgttccagatatccacatgtctgtttcctttcctccctcagttctcttttcacctgttgtcttctcaatgaggctcatttttgctgctacatttgtttttagatgtatttgtaaacatctagacaccctaccccaacactacctattccccttcttgacttcatttttattttttgtgttgatcaatatgtaagatactatgtatttcttgtattcattgtatttatttgttctttcttaatagaaagtaaacttcccaaaaacaaggattttcatctgttttgtcactgctttgtctctgctgtctagaacagtgggacatattttaggtgctcagtaaattttcaattggatgaataaatacaataatctcagaagatgtaaaaactgcattccataaaattcaaaatccattcatggtacaaaatcagtgaactatgattaaaaggtaaaaacattgagcaaacatgatatttattggtgaaacattgaaagtattcttttttaagattacaaacaagttaatacatctttaatcagcaagataacatttctatgcagcattattatataggaaattctagctaaaacaatacaataagaaaaagaagaattattagtattgaagaggaagaaacaatgctatccctagtcttagaggatattttgtctgcatagtaaccatcccaaaaaaatacagattaagtattagaatgaataaaagaggttatcaaatatgccacaaacaaaatcaatgtacaaaatcaattgcatttctgtactttgctacaaatatttggaaaaggtaacaaaataccatttatagtagtatacaaaatataaagtacctaggaaaaactcttagaaaaacaggaaaagacctgtgtggagaaaatgataaaacaaagatccttgagaaaacctaaatgagtggtaaaataaatcatagttctgagtagaaaaataccaatctacaaaagatatgattctcctaaaattgtttatttttattttttatttttttattattatactttaagttttagggtacatgtgcacaatgtgcaggttagttacatatgtatacatgtgccatgctggtgcgctgcacccactaactcgtcatctagcattaggtatatctcccaatgctatccctctcccctccccccaccccacaacagtccccagagtgtgatgttccccttcctgtgtccatgtgttctcattgttcaattcccacctatgagtgagattatgcagtgtttggttttctgttcttgcgatagtttactgagaatgatgacttccaatttcatccatgtccctacaaaggacatgaactcatcatttttatggctgcatagtattccatggtgtatatgtgccacattttcttaatccagtctatcattgttggacatttgggttggttccaagtctttgctattgtgaatagtgccacaacaaacatacgtgtgcatgtgtctttatagcagcatgatttatagtcctttgggtatatacccagtaatgggatggctgggtcaaatggtatttctagttctagatccctgaggaatcgccacactgacttccacaatggttgaactactttacagtcccaccaacagtgtaaaagtgttcctatttctccacatcctaaaattgttttagaaattttatggaataaaaatataaaaattcctgcacctttttactcaccatggaccatgcaagctcattcctgcccgcacacagaacagcgaacagggagttttgccctcccagatattaaaactgtgtactactataaaaatagcaattaacacagtatagtattgagtagaaaaagaaaataatagatgatttcagacagactagaggacccaggaagagacccacacatttatgtaaaattctttataaagacttgactcttaagacaggtaaatgcaataaatgctacatgacaattggttaactaagtggagaaaaaaaatggatactacctcacatcacacataaaaaaatcaattctggttgcaagacaaatctaggaaattgttagaaaaatatatataagaagatagctttatgacctcagataatgaagaattttaaaaacaagatacaaaaagcatgaaccatatgggaaaagatttagttttactacattactaccctatttatccttgttaaaatgttcagtagctccaaatacaatggaaaaaagactgggaccagtgtctcacaaaagagaaaacacaaatggctaaaactaatatgagaagatacacaacctcattagcaatcaaagaagcttacatttaaatgacaatgacatatcatgttccagccagtatattggagaagctaaaatgagtaatagcaagagctgcagaggtatgggagaaacagaacattgttagaaaggaagtaggttgttagaactaatttgcaaagtactttgactttatcttgacaagtttaagataccttaaatcccatcaattccattccaatgtatagactctggagagcttttatatttatatatgtttatatttattatatattatatataattatatgcattatatatattcacacacacacacaggagatgaccataatattcacagaatacttgcttggaaaattttagtagactacttttagagcaggtttaggatcacagcaatatagagcagaaaatagagttcccatatagccttcatccccacaaaagggcaaccttttcactatcgacatcccaaaacacaattgtgtatttgctgcaattaatgaacctatgctgctgcatcagtattacccaaagtccatagtttacattagggtctgctcttagtgctgtgcattctgtgagttttgacaaacctttaatgacatgtatctgtcattgtagattcctatagaagagtttcacttccctaaagagcctatgtgctctgcctattcatccctctcttcccactaaaacctggcaaccactaatcttttcaatgacttcatagttttgccttttccagaatgtcatatagtggcaatcatacagtaggtaaacttgtcatattggcttctttcgcttagtaatatgcaattaaggttcccaccagcactgaattcccatcagcaatgaatgagagtttctgttgctccacatcctcgccattatgtggtgttgtcaccgtttggattttcaccattccaatctgtagaatcattgttattaattggggggagagacaaccaacaaataaaggaaataactcagaggttcgttagcagaatgattttaaaaattgagggctgtgcatataataaagtgacataaaactatatacacacattgtactaaagtcgatttgctgttttgatattgtactgtaattaggtaagatgcaagcactggggaaactgggtggagggcacatgaagcttctccatactatttctccaactttccgtgtgcctataattttttttcaaaccaaaatgttaaaaaaaattcgagtgttgttttctcatagataaaatactgtccagctatggaagcaatgaaccacagataaaaaccacagggctacatctcacaaacgttatatggaataaaaaaatgcagtcgaataaaaacagatgcagtataatgctcaaaacatacaagctaaatgatatattactttgggatacaactgtgataaaactcaagaaaaacaagtgaatgataagaaacagaattggtgataatgcttatctcaggggaacccccacgcttttgtgagttttacatgcaggagactatcaggtcctcatagtgaatatcggagaataattcagggggattggaaaaggaacattttgaaatataccagagcattctgtgtattcttattaactaacccgccctcgggagaaacgatcttcctagagtctaacctgctgaggttttattagagcctaacatacctgggctaagagaaaggaaggaggtttcatacaaaatgaagcgttctcttaccacatgatccagaaatcacactccttagtatttctccaaatgagttgaaatgtccacacaaaacatgcacatggatgtttatagcagttttatttatgattgtcaaaacttggatgcaaccaagatgttcattagtaggtgcatagagaaaaaaattgtggtacacctagacaatggaatactattcagtgctatcagtgctaagaagaaatgagccatcacgtcatgaaaagacacaaaagaatcttaagtgcatatcattaagcgaaagaagccaatctgcaaaggttacctaccgtatgattgcgattatgtgatattctggaaaaggcaaaactatggagtcgttaaatagattagtggtttagtggggagggaagcgtgagtaggcagagcatgtaggatcttcagggcggtgaaactattttttatgattctgaaatgatggatgcatgtcattatacatttgtcaacacctataaaatgtacagccctgagagtgaatcctaatatgagctatggactttgggtgataataatgcttcagtgtaggttcatttattgcaacaaaggtaccactgtgctgggggatgaccatcgtgagggaagctgtgcatgtgggtggggcaggggctatatgggaactctcactactttctgttctatgttgctgtgaacctgaaactgctctaaagtataaagtttaaaaatttaaaaaactctgatctttagtttagcattttacaatctattttattgaaaggaacaaataaaagttaggattaagagaattaaacatttttcatagagcatataaatatagagcatgtaagagaagacttgattctcatttcagttctgatctgtctttaactttggcttagctggttttagctgatggtttttgaaggatggtccccagaccagcagcatcaataccaactggatatttgttagaaatgtaaattctcagacctcaccccagacctattgaatcagaaactctgggagagggactgctatggcttgaatgtttgtgttccctacaaaattcatgttgaagcttgatctccaatgtaacagtattaagaggtggggcatttaggaggcaatgattaggtagtgaggtctctgacctcatgaatgggactagcaccttatgaaaaggctggaaggaactacgttggcctctttggcccatcaatctcttctgccatgtgaaaacatagcatcaaggtgccatcttggaaacagcactcgtcagacattaattctgctgggaccttgatcttggacctcgcagcttccagaactgcgagaaatacatttctgttgttattattacaaagtgtcaggtattttgttatgcagaaggaacagactaatacagggactcagcagtttattttagcacaaggcttccaggtgattctgatgtgcatagacttttgagaaccactattactttcaaccttttcatctataaaattataaataacactagatcactttttttcaacgtgtgatgtatatattactgatcatgtgcaggacagttttaggtggcataaataagagcattttaagttttaccagctctgtatttattttaaagtttgttagaaaaatataaatagcataccaaatctacaagttcactggtgtttttgcctcatatatggctaagttaaaaaaaaaagaaaacaaaaagagaatcaatggaatcaatttgaacttgatataaatagaaatagccaaaatagtaaggtgataggagaatatcacaaggtgcatggagtaatttctcaaattttgaggccttagtaaccctgcactggattaatctcctacgtattttcattctaaaactatgagatttcatatgctcgtttttcttacagatttgcctccttaattttctttttaaaattcaagctcacatattaaaaatgtagtcgatgctgtttgagcttggaggggaaatggcctattagtgtgcttttgtactgggggatacttatctgagattcatatttaaccatggttaatggacatggggataattcacatgcaaatcatcaaagttaaatatattaagaagaaatctgtcctgaaaacaccatttaattttagaagcattttcttcttttcactacttgaagtatttatagtggaataggcagatgtttttataaaaaggaaatgaaacgacatttggggacagtaataaacatattttggttaattagggatttatactttgtaaaagttttcacattataaatagctaaaacatagctggcctttttaagtggcagtttaaacagctttattgagatataatttacattgtcatagagtccatctacataaagtgtacaatttagtggttttgtgtattcacagagctatgcaaccatgatcatgagcaattttaggacatgttcattatcccaaaaagaaaccccatgttcattatcagttactccccatcccccatgtagttccaaccctaggcaactacttacgtactttttatttctatggtttttctcattctggagattacatagaaatggaatcatatatgaagtggccttttgtgactggcttctttgacttagcatgttttcaagattcatccatgttgtagtgtgtgtgtgtcagtattttattcttgaataatattccatggtattgatatatcatgttggtctatccattcttcagttaatgaacatttgggttgcttttactttttgctatataaataatggtactatgaacattcatatacaagtttttgtgtgaacatatgtttttatttctcttaggtgtatacctaggagtggaattgctgggtaacaatacttaatacttgatggtaactatatttaataattcaagaaattggatataaagcactcttattcaaagtaaaattgcgattttatttaaaactaactacatttctgttttaataaggtatgaattttgtttgtcaaggattttacataaaatctgtctccaaaatggtgtttggcaaaaatcattattaaaatacatgtttttgaacacagcagcttacagactgctattctacatcacagtttatcatcatttatcaaaattgtcatgtcctctgtgacatgtttctttttctgaatattttattgtcacatgtgtcattaagcatttagaaaaaaaatggcctggaatcttcttcctgaactgatgaaattcatgatttttgtgtatagacatttacaaataaattatatgttgttaagaaactaatggtagttttttttcttttaaaattctcacttcaacatcaataaaaaatgtttctgaaatggaaacataccattttgatgtctaactgcatctgacacttttaagttttgctgtcctattattaatattttaaagttttaggaagggctactttttatataatgagattttatattccataaattattatttgactttgttttactttgtcacaatgcttcttcaaagcttttttgccaaattggctacctttagattcctttttaggaaaggtcttcaggatggtcttttttgttgtttttgtttttgtttttgttttttgagacggagtttctctctgtggcccaggctgaagtgtagtggtgcaatttctgctcactgcaacctccgcttcccaggtttgagtgcttcttgcgcctcagccttctgagtagctgggactacaggcgcccaccactacacctggctatttttttgtatttttagtagagatagggcttcaccatgttggccagactggtctctaactcctgacctcaaaggatctgccagcctcggcctcccaaagtgctgggattacaggtgtgagcctctgtgcccggcccaggatgctcccttttaatagctacttaggaaattaggttttggtaccttgttgttagaagagaatattcctgaaaaaaggaaacaactaaatgcatcgactatctggggtagtagaaagagaagcgacagcacagagaaaagatgccccttagggaggagaaagaaacaaatatcaattagacttgaacgaactaggtttctttattgatgaagaaagttaagccacactttaactttccttgccacactaaaagcaaacaaacaaaccccaaagaatagtcaagcagctgagacattcagtagccttgtaggcaaaacaagacatattcttattgttggagtatagttgtgtaaggcctgtagcccctttcttttgactaatttattccttttggaatgaaaatatttactcaatgcctgtacctgatctgcagactgatcagctgaaatcatccttgattttatttctgatagggagaacctgtcctgcacttaccatggtagagtagtgggtgtttataatgaagatgtaaaactttatagtttggatcatgtgggaggtagactctgatacagggcttagagtgtttattagggagtgctgttggaaacaacacaatggaagagaaaagaatcaggatcagacagatggaagagtcaaggtgtttctttggccaacaacatggaagctttagaactgaaatggttaatcagtttagtgccatgtttggccaaagtggccaggtctttgtaaaccacctccattagtaaatggatgcggctgtcacctcccacccaccagagcatgaccttaggtcaggcgttctctgcagctcagactgttccagcccctaaaggggcttacagctgggattgtcctctgacaacactccctacatctgggccaagaagttcttccttgaggattggtcttgatggtgtttctcctatgtctgctgcactacatcagtcattgtccccttaaccttcacaaaagcttttgaaaatatttatattttttgtttataaaagtggtacaattagacaccaatctgtattcaacagggcaatggttaaatccatgactttggagactatgtgtgctcttgtttgaatgtttctatctcccccagatttatatgttgaaacctgatctccaaagtgatggtattaagaggtaggacctttggaagatgattattagatcatgagggtaaggctctcatgattggattagtgcccttatataaaagggccaacggagcttgtttgtcccttccaggacatgcgaaacgcagtgagaaggaaccatctgtgaggaagtgggccctcactcaatctgctggtaccttgatcttggacctctcagtctccagagccatgagaattgaatttctgctgtttgtaagctacccgtcaacgatattgtcctagatccgcccaaatggacaaagacaatttagaattaacataatgaggaaatctgtgtgtactgatgagaaaatatgtccatcatgtcatagactaaaaaaaccagtttgccgactatacacatatatacactatgattatatttttatttacaaaagctatacaagtatgtaaaatacacaggtacgtgtagattcactaaagcttttaccttctgaagactgggttgggggtaaacaagaagagagaatgatagttttcaatttttgttttgtatgctcagtttatatgttcatttttctgttgctgatgtaacaaattatcacacatttggcttaaagcaacacaaattgtttatctcacagttctggaggtcaaaagtcaaaagtctgtcttactgggctaaaatcaaggtgtcaggagggctgtcttcccttctggaggttcaggggacaatctgttttcctgccttttccagattctagaggctgccttcattccttgacttgtgacttcttcctccatcttaaaagccagcagactcacatcttcaaatctctatctaactctctcttccgcctccatcttccacttcaagaatccttgtaatttcatggggcccacccagataatccaggataatttccttgttttaaggtcacatgattaacaatctaaattccatatgcacctttcttaccacttgccatgtaacataacacattcataggttctagggctttggatgtgaccatgtttggtggggtgttattctgagtactacactaggtaagtgaaactacagctttctcacaacctatgtgctagctgttcatgcttcctgttcagataataccaggtaaatgagagaagagaaacatccgtgggtaaacaattataatttagtacattattattctttaatttctatagtatttataataaagttcaataagaatttatctatgaggaagtggcttttctaaacaagtgtaaagcccccttgtttggaaaaatgtcagagagactgcatactttttcttcttgcccgcttttcccatgctggcctctgttgcagctcttctgaaatgtaatcattgctttatttctttatttatctctttcctaattttcttggaggttctttaagatgggggctatatactttaacttaccaacctattcaatgaatattcattaagtacctattatggctaactatttttctgaacatttgggatatataaattgataaaaaccaataaaaatttcacttctttaatggaggaaagacatcctatatagagggtgatgaatggaaataaactagaacaggtcaagaagaatcacaagtgccaggtttagggattgtttgtaactttaaataggttattagaataggccccattaggatggtgatatttgagtaaaggctttgatgtggtttgggtgtgtccccatccaaatctcatcttgaattgtagttcccataatccccacgtgtcgtgggagggaccctgtgggaggtaattgaatcatgggggttttacctccatgcttttctcttgataatgagtgagttcttgagatctgatagttttctaaggggcttttcctccttttactccacacttctccttcctgctgccatgtgaataatgatgtgtttgcttccccttccaccataattgtaagtttcctgaagcctccctagccatgctgaactgtgagtcatttataaatttcctctataaattacccagtcttgggtatttcttcatagcagcatgagaatggactaatacaggcttggaggagtttaaggagttagtcatggggtgtcagagtacgcttcattaggaagatgctatttgagtaaagactttgaggacttcaaggagttagtcatgtgggcaactacacaactgcattggaggcagagggaacatttactctaaagtccttaaggcaggaaaattccaagactgatcaagtaacagcaggagagcgtgtgcagacgccttgggccaagatgttgaatacatactgaagggagccaagggtgggaggtgatccgagagagtgatttttctggtgtggatcagggtggtagcaatgaacgcgatgtaaactcatcagattgtggatgcgctatacttggaagatagggcaagtaaggtttgtggacaggttggttgtgggatatgacagaaagaggttccaaggatgatttcaaggcttatagtttctctaattggaaggaggaagttgccatcaactgaaataaggaaggctatgatgagcaggtttggtagagaagatcaagagtttgtgttgggcctgttataaagttgagattctataagacttccaagggtagatggtgagaagacaatctccagatatatgaatctggagtttaggaaagaggtctggaatatgtgtaaatatgggagccatcagcacataatagatgctgagtgaacgaagagactgcctgagattatcaaatgaggcatagatggcttgagaatgagactgaggttggagtcctgggtcactctagcagagattagggtaagaagggaaaccaaccaaagagagtaagctggagccctctgcaccctttttgacagcagtaggtagtagatgtttatttagtggataaatgcccaaagaggaggtaaagtagcaaatgacaaaggggaattttatctgtctatgtagaataaattaaaaggtgaaaaacagaatcaactgtatttatctcatcagtgaatgggtaggaagcaagtgatggaaattaacataaaagtagatctgaggccgggcgcggtggctcacgcctgtaatcccagcactttgggaggctgaggcgggcggatctcgaggtcaggagttcgagaccacggtgaaaccccgtctctactaaaaatacaaaaaattagctgggcgcagtggcgggcaactgtagtcccagctactcgggaggctgaggcgggagaacggcatgaacccgggaggcggagcttgcagtgagccgagattgtgccactgcactccagcctgggtgacagagtgagactctgtctcaaaaaaaaaaaaaaaaaaaaaaaaaaagatctgttcctttttactctataaatatatttgtttataaaaataaccgttaattttaataagttaaagtgtttttttcttatgcaattacttctttttaatcttcatgatgcttaatgtgctggtgtggctaattctttgaaaaagtatgtaaaaaaatcccttctctacagagatgaatctagttcttcagattggttattcctatactttttatttgtttttgtttttgtttcagagacagggtcttgctctgttgccctggctggggtgtaatcacagctcactgcagtctcgacctcctgggctcaaggaatcctcctgcctcagtctcctgaatagctgggactacaggggcacactaccacactcagctaatttatttattttttgaagagatgaggtcttgctatgttgcccaggctggtctcgaacttctgggctcaagcaatccccctgcttaggcatcccaaattgttgggattacaggtgtgagccacccatgcttgaccatgtgaatatgaatatactggagaatagcaacactaagtagttgaaactcattttagaaattaccccatgaacatatctaaattcttcataatgagtcatagaagaatttctaaagtcaacttggtaaaatgtactgatgattttcattgaaaaagcatgattttgctttcatatatttaataatttgtagaactttcaactttcactgtggtcttaactggtattaaaggtgatttggaaattgtattgagcatgtatcttgctatagtataaaagaagtagacattttccttaagaactttatattctaggttaaacagttaaaacacttatataaatatacatataaacagtttagttgagaaaatataagatgatgtaattgcaggtctgtttgactcccacctatctcttttgagagaagaatttataaaagaatagactgaaaaagtggcaataactataaacttgcattttgacaggaagaagaatagaaaaggaagcagaatcagctgccttgatatggatacaagttctacaaataggacagccactatgcttgaatagtagtagttcacatacttcacgaagtaaattaaatgtgattatattgggcctgacctgttggtgagaagtggatgtctcagcgtggggaggtgtgtaagcttgctcaggaccaaaaagagccctaggtagtgaaatctttgtgaggggttggaacctgaataggaaatagcatttaacaatgctcatcttaaaaccgaaaacctcagtttttttatgagtatgttaagaatctctgaagatacaacctgggttggacgattacccaagatctgttacatatttaacatcagggaagttatgcaaagcttattattgtttcttgtgtttattttgggtgctgaccttcagaaaggccttagctaatctccaggtcaaagcctatagtgaccacccttgctgccgctgcatgccacacctccctctctgtgctatcttgctgcatttagggactttgttgtcatagttcctctcttactgcaaagggattccaaagctcttgaaaaataggaagtagctcatccttttctatgggctgaggggagcagtccttgatttacgataagaaaattctataatctttggacctttgatagaggtgacaaatacagagatctttcttggaatataatttgtccaaaactattttgagaaagcacacaaggcattaacatttacatttccaattaaagcatagggaaactgtttacaacaaggggacagaagttgatgctgttgtttattgtgttatatgctggttatagaccctcgttttacagttatttctctaaaatgcagtaaaaaaaaaaaagaatgcctagcaacatagcaacctctatgaaatgaggcatatgctgtttctaagactcacaatatgtttttctgaactgtttgctcataaacatgtttattgtaggtgctgcttgggcagggacggctttcctgtagaaatcctctcttgaatacactaggttctggttcctcttgtggaagaatgaagctctttttgactgccttggaaaatttgatactttcaggtatttatgacataatcaatggctgatatgtgtcttcaggatttatgactgtcctgtcataaattgccgtagtttcagagtgcatacaacatcactgtctttttattactgttattattggagacaggctgtcactgtgttgcccaggctggagggcagtggcgaggtcttggcttattgtaacctcctccttgccagctcaagccatcctcccaccttagactctcgagtaggtgggactataggagtgtgccaccatgccttgctaattttttaaaaaacatttttgtagaaatgaggttttaccatgttgcccaggctggtctcgaactcctgagctcaagggacccacccacctcagcctcctaaagtactgggattacaggtgtaaaccattgtgcccagcccactctgtcttttgaggtggtgggaaggtgagatgtagtgacacagatattctgtgtaccatagtgataccttatttatgaatcatcttgctctctctcttgaagtctctctatgctagaaacatcatctgatgtggtattcgacacgggttcaccttctggttttgtcactaaatgctttatgactttgatctcagcccttctctgtgtctagagaattgttaaattactaaattaaaatgaatttttgagagtcttttgatgtcacaaaatgtaatagctgctgagtgcccaagtatatatcaatttttctttagtgaagaagatgcagaagtggtaaaggagaggctgcttttggagagggcagagtgagaggagatggaagtttggaaatatgtcttataaggaaggccaatgaggaggcaatcattctgtaacatgtacttgtgatctagtaaagcttgtgttttgtatagaaggctatgtaggcttttatgactgggaacgtgtgaaaataatgacctagagccaatggggcatagggacatttgcggcatctaacccaggtctttttcattcccaggctagggggctacaattctcttctgaaagttacttggcatgatcatcttgctgttcttaaagcaaaatagcccaaattttgttgaagaaatgttttagagaaatgattgcctcatatttctaacaccactcttggttatttgtttactaaatagctttttattgggggaaaagtgtatggaaatttaagttggggaaattacttgggagaacttcttaatgtattagtctgttcttgcactgctataaagaattacttgaaactgagtaatttacgaagcaaagaggtttaattgactcacagttctgcaggctgtacaggaagcatggttggggagccctcaggaaacttacaagcatggcagaaggatgaagaggaagcaagcaccttcttcacattggcagagcaggaggaagagagtaaaaggagaagtgctacacacttttatttatttatttttttgaggcagagtctcactctgtcacccaggctggagtgcagtggtgcgattttggctcgctgcaccctctgcctctcaggttcaagtgattcttatgcctcagcctcccgagtaggtgggattagaggcatgcaccaccacgctaggctactgtttatatttttagtaaatacggggttttgccctgttggcgaggctgatctcaaactcctggccttaagtgatctgcctgcagtggcctcccaaagtgctgggattgcaagcgtgagccaccatgctcggcctacacacttttaaatcttttaaataaccagatctcatgagaactcactcactatcacaagaacaacaagggggaaatccacttccatgacccaatcacttcccaccagatccctgtcccaacattggggattacaattcaacatgagatttgggtagggacacagagccaaaccatattactgaggaacaacttaatgtagatagtttctgtgtatgtgtgagaataaagttttcttataaaccattctattttttaagttcaactattttatcttccttaaagataggggggttgaaagttgattttatagtttgagctcttgttatttttcaaccattagccaataaatataagtggcaattatttaagaagaataacataataatcaaatatgagaaatataagaagcttagaattgtggagttggaagggacaagtcacctcaatttatagtcagcatttatctaattgttctgccccccttaactgtaaaatggcaaaagtaatacttgatccataaatttcttttaaggattaaaagataatggattaaaagataatgtatacattcaaaaatattttttaagtgttttgtttgtttggtttgttttttcaagacaaagtcttactctgtcgcccaggctggagtgcagtggtgctatcttggctcactgcaacctccgcctcactggttcaagcattctcctccctcagcctcccaagtagctgggattacaggcatgtgccatcatgtccagctaatttttgcatttttaatagagacagggtttcaccatgttggccaggctggtctcgaactcctgacgtcaagtgatctgcctgccttggtctcccaaagtgctgggattacaggcgtgagccacagcacttggtctattgagtgtttagtatgtgccaaggcatatgctggttcagaggatatatctgtgtactagaaagaagatcctggctttactaactaggagggaaaaaaactttacccggtgatgacaaaggtgataagtacttccacagtgctcactgggacaaagtgtcagaccttacacagtacctgatactaggggagaaagagggatggacctgatgtgtcttgggtgtaaagtatacccattatataatcctaacagcaattctgtaaacctggtcttattttccttccttttacagatgagcaaacttgtgttcttgtaggtctgtgtcaagtaatgtttgttaaataagttaatgtgtaaatggaaacctgagcagttgtgcaacatgcccaaattcttcagcaagttagtgacagctgggaccagagctgtttctgacttcagcccaggggtcctttcattattctacactgcctctcagagtgtgcataggtgtgtgtgtgtatgcatgggagataggaaagttgcagtcttatatatgctacacttatcaatataaaaattatttcacaaaacacaaataatagtgaagtcagggctcctagtttaatccattttaattcctatcactagttacaggtatatttaattatccagatacgttgactttgtgctgtggatttagtgtactaaataacaggatccaaatctgtgaagttttctttttctggaaaactactggctctgaagcaatttaagccagaattcaaggccattcatccaaaatttaaggtgttctgaaatagaaggtgtatatatcactttacttaatgtgtgggttgtgtgggagacttttctttgcaaattgaatcattggagaccaatgatcctataactgcatttgaaatccttcagctggcaaacctttggtagttttaatttctttctcaaagaaaacatctgttataggtgtctgtagtctagttgtgtgtgggctaccatttcaattagtaaagctataatgacagtcttgggattttgtagaaaccctagtaatagatagaagtgaacatttctaatcctttattatgatcccgttatcaatttcaagtcagtttcttccctatgccatctatccaccaactcccagctgtcttgaaagaacatatataatatttttctaactttagggaatttcttttaagtttgagggcctctttctttttgctaggaagggaagccgggtcaggaaagcagaggagttagttttggagggccctccttttgtgcatcatttagttgcagacctaagcaatgtctttaatcccaaggaaatgatacaacactcctggagtcttccacggttttcagaaggtgagtattcactaacagtacctaactctgtcccttctgtaatttatgtggactctaaacattgctgtaaagtactgctggagaaatacaagacttgtacatttttcttttcttttcttctttccttccttccttccttctctttctctctttctttcttttttttttttgatggagtttcactctttgttgcccaggctggagtacagtggcacttaaaagtcaacctgaatcgcatttttctccagtctgcaatagtttgcccaaataattacagttttaagtcttttaaatggttactagtccttccagcacagaaaggtgatgcagccccaaataatgtgtatgtcggtactgtcactacagtgctttgggtcgaccaatctcatcctgacttctgatctggagtctactgtcatagaaaggtataatatgcttataatttttctcccccaatatttctttgcttctctgtggcagtatttctcccccaaaacacttagagatgtttgattttatccttgcagctgttataaggcagacaagctcgagctgacacacacagtttctctcatgacaaggaccaattgtgatttatgaccatttacaggatgctagtgatgtggggaagggtgtgtttttagctagcaaggctatgtcctttcacttggaaataaacaacatgttaaaaatatgtagcagggttaaaaagaggaagcttcactgtaattttcgtttagtgaagagcccttaggctaactttctataatgttcagctaatgtgtttatatcttcaaatcatcttaacaaatatttattgactgcctgcttcttgcaaggtgttatgctggctgaaatgaaagttttcatgaaaattctaatgtatagaattaggaagttagaaagcggggttattagcatgggtctttgtctgctttagttgaatagaacctgttatgaagcaatacattttcctccaaaaatttggcttctttagcaagcagcatatcaactaaagatgaaagaaagaagtggaaacatttattcacttgtaatgttaatataaatctttgttttcatcagaaattcctgaaaagctagattataatatgttacagtacaaccttgggtttggcttttagcaccaaggttaaacaaagatttatgaacacaaaagatgctgtgaaagctcagattcctgctaaaccttgaatgtcctatagtcctctaaatggtcctaaatgtggaaaaatcagtcttctcattggttaggacccactgacttccgtcattgtaattactgtgatataacctgtagggtatgagtgattaaataatttaatatcactgggagagttacttattatgtgttttatttgtatatttgcaagcagttcttcatttctcatgacagttcttgcattcatcatttactaaaatggggttctgagttaataacatttttttcctcattataaaaattctcagaacaagtcaagatctaattagacatcttcaatttattaaatcagacctctttacagagcccttttagaagcccaggtaacacttgttgttttaaatcactggcccaacatagtcacatgaatataccttgatgcaaagaagacggtgaagatgtaattttttagcctttgcatattaaaaaaaatcagaattctgatagtaagaaaaacatattgtttagttgcccaagttgtgtctttttctccacctctgatttcttcccaatactttgatgaagtactctgatgaagtactcccaatactctggcgattttctttttcttacccactataaagtgtggtgtttgcacttcatgcctgagtctttctttctgagaagaggctcctgcaagtctttggcagctttcaactacattaattttacaggtccatccttgaagcaaaactttaaaaaggtattttatgcttttttccttcctttttttaaaaaaaaaatttttcaccttttaattgtcagttctaattatctgtgcaaactgattcaggcagaaacatacaattctgagagaaaaagggaccctgggactgacaacctaggtttactgagtgggagaggcagaggtgcttcccaaataaaaactgtggctgttaccagaagaagggaacagggatgctggaaaaagaaaggacagacatccagttctggaaggtttatttggcttttattcataaaaatacgaaaacctttccttggttttctgctcttaatcttcctttaaatacatcaactagacatagtcgatataggtggttcttgtaagataaaacctccttggccccatgcaggtactctcctgatatttatacacagaattgcccatgtctcttaaaaaagagaacatctgatttgcctttaagaaaaatgtgcaggatggggtgggaatgagggtgggtgagggctttacatttcatgcagttgcagactttttggaggcagcttttactctctgggtcatattttaattcctgatcctgaagtggaggggaatcctgatgttagtgtctgggtggtattcttgatagacttttagttgaataagtaaggaaggatgcttacatgaacaaaccttattcagtgtcccagtttctgagcagcccaaggcaccaaagcctaacctaggatgaggatggtttgtgtggagctggtgaaactacagctcccgatctcatccaagattgttgttttccatttgctgctgaacagctgtttgtttggctttccagcggcatgaatatgcccacataatcacaaactcctagatattgaggcatcttaatgagaacatagcctgattttggaaggaatggaatgaaggaggccaagtgaattgcatcagggtgcctggtagaaaaactggcattagaacctcgattctatgctcactgtccgtgctctgctccagtacatgaaatttgtcagagaaaatgagatgaagcaccatggtttcctatgccctccctgtttgttcctggtacttaaccaacctaaaatctactcatggatctgtcaggttttagatttagtaacaggctcattgactatggaaataattgggtgggggctgaggtctttatggtagattcaagtaactagagcaagagtagatgggttattgtggtagaatgagggacatttgctagtttaaatcacatttctgcagtttgtggttggacttggagcttctttttctctgtagcttagtagcagatgcgcttttcgctgctggagcaaaactacctacagtagtgtgaatcagcaagtagggagtattattagtcatgtgaattcagatacttcctattgccaaaggcttgatatattcatatcttacattttatcttctctgtgacgattcattacatgtagtgagagcatatacttagtcttctgtgtggctcaactgggggcacatttggtctagtccaagtaattatatgtaacgtaaaattacatacagcacagtcatcaaagaagctgtccttccttcccctatcactaagatctagggtgactctggagtgccactgtgtgaacatttctcactcttgtgagcatgtttctaaatcccaaatcaatctgacaaaggattttctgtgaatttcttgttaatttcttgacataaaagctcttatgaacatacatattccgaacttaattctttgtttgagtcaaaatcatttttattcaagagggaacaattatattaatctagatttgcctggtaaatccataacatacagacctgaagttcaagcagaacccgaggtaatgtgagccctgggtaaggtatagtaaggatggagaggtaggtaaagaaaggcgagaatgattcatttattgagaaagatgagcaaggtggtcaaatagatttgcttctcaacaaagcgtgtagtttaagcacttagttttggtttcttttgaagctgccttccctttttcccatctctctattccaacataacagaaaaagaaggaaaaaaaatcaatacaaaacaaccatttacttatttcccagagtaatgcttctcaaactttagcaatgtgcatgcaaatcacctggcaatcttgtaaagtgcagattctgattcagtagtggtcaggcagtgattctcaaagagtgttccttggagcagccttgttggaacaactgtgagcttattagaactgtaaatttatgagccccacctaacctattgagttacaattttattagatgggcccaaaaagtgttttaggaagcttaccaggtgattcttattcacctgaaagtttgagaatcactgacatagaggagattctctggagtttttctcaggactctggtattttctactgtcactgggcttacagtatacagttgatctttagcagtggaaacagttggacagagatctttatttaggctcctgaatggctgtcggcatcttgaaagttgactggcttcattaaagtctctatttcttggtcctttgacatctattatgataaccctgatactttctaaagcagacatgccacttcatggaatcacgcacctcatggaattccatgcacttcatggattcatgcacgttagcacagctagacacctttatgtggcaattgggtaatacttactttaaaagatagaataaaggaaaaactacctaaaatttcccataacatttttttttttttgcagacttttcaggggtatggatactatatgggctttatatcttcatatcagcttagtcctagttaattgttattttcaatcatattaatggccattggtcattgctagccagtatctatgactggctggttctaatggctacaagcatgcttagcagtgccctcatgaatgttgctattattgttgaaggaggaaaacattttaataattggaattggattttctcagtattcagtattgcaaaaggtggatgtaacttcttatgatgtctcaacagctattactttattttttaatttatttttaaaaatcttattgtcacaccccatgattctgcaacagctataattttaatttctgaaagttttgatgatttcctccaaggctatagctggagaaatgtacattgtctattattagtaacatttctcaaattgtttacaaggcctgcagtatagatgggctgagactgtgtttatgctttttcattgagaaattttggtcttgcagaaggaatccatttgttctgtgaatctctataaagcaaagagaagagttcaaaatttataagggagcccaacaagtgttccaaaaaaggctatttaggcacaacatttaggtgcttatctagtatgttgtttctatcaatacatagcttaaatataaatagatctaagaaccttagttaagacgaaagggtatagcataccatgctataaaatctgtcatacagaatacacataaagtgtctgctgtaattttgtaatctttccaaaagcaatatactgtgtctacagccctcatttacaacttatagaaatttactcattttatgcagaaaattggaaaggagcagatgtttattcctaagctagaattttgaaggccaacaattaaaataaacatgtctctgccaaaacttgaactaaattgaaaaatttagcatataaattaaagctcacttaaaactaaatttatcaaggaaatacatttgttttgcattgctggtttcaattattctgaaaggacttttatttttatggaacactgaagatttttaaaagtttcaaacaatttattggacaattgcaccatttaaaatgagttacaaatgtcttgcttaaatgtatgagctattagcacatagttgatgaccttatagagagacattaaagcaaccatatcctcaagtttatgtctatattcccaggggagtacaagaaactggtctgtagacctgaaatagataaagctgtgggcagcattctcttctattcatttgttcctttggtcaggaatctgaattttgagacatattcaataaattatgcatactcaaatatttgtgctcttagcttattgccacagaggaaaagagattatttcctactttttagtatctctctgcttttgtctgatttgtacaatgttgcctaattaatttttcttaaacactttgccctccacacattttgcctaaaaccttcattggctcttgtaagatgtgctagcattctagggtctcagtttactgttgctaccctacttaaatgaatctccaatgcttcctaattgttacttcttggcttcaaccaatccaatgagtttcctttctctgacacatatcagatttatgcaaagtagtttcttggcttaagttgccctatatttctacaaaggtctagtcagatggtcagatgtgactatctctacatatgggtctgaaatctagtttaggaattctatgctgtgaatgttttagcttaaaactctaaaatttaactagttttttgaattctctctattatattacatgcttctggaataaatataaacacaatgaaatcctttcttgaaaatttaggaagatgttatacacaatataaataagttgtaagatagtgatttctactagacagttaaggtattaaggactatttgtccttgtattaaatggacccaggctatgcctttctagtgtttttgtatactctgattttttagtggctttccattaaatcctgaaagctcactactaagactcatgacattttttggggggttagaaaaattactatgattcagggctgggcgcggtggctcatgcctgtaatcccagcactttgggaggctgaggcaggcggatcatgaggtcaggagatcgagaccatcctggctaacacggtgaaaacccgtctctactaaaaatacaaaaaattagccaggcgtggtggcgggcgcctgtagtcccagctactcgggaggctgaggcaggagaatggcgtgaacctgggaggtggagcttgcagtgagccgagatagtgccactgcactccagcctgggcgacagagtgagactccgtctaaaacgacttgcagcacatgaacttacttactatgattctctctctcaaataaaattctggtgacttttctttaactcaccaaaagtagatacatacatatttataattcattgtttgaagaaaagccttaagatattttgaaataaaattctacacacattacacagaacttgtagctacatgaggagagcaaggtttttttgttttgttttgttttgtttttgagacggagtctctgtctgttgccaggctggagtgcagtggcgcgatctcagctgactgcaacctctgccccgccgggttcaagcgattctcctgcctcagccttccgagtagctggaagtacaggcacacgccaccacacccagctagttttttattttaatttgtatttttagtagagttggggtttcatcataatggccaggatggtctcaatctcttgaccttgtgatctgcctgcctcagcctcccaaagtgctgggattacaggcgtgagccaccgcgccccagcctgtttttgtttttattttgtaaaacggccttctccacgctgaaactctctctcttttgctctttcatctgtcatctcctccccactcccacaccccacactcctttacccaatcttgccactgcaggacaagagataggatgaaagttggaaaataataatttatggagaaagcctgtgttccttgctttatgaaagtaaattgtagataattaatgttgtgacaagatgattctattttgatgaataaaatcattgaaaagctatcaagccccactgtttctctgctgagagaactttttttcctctctgttctgcattcctattcttggctttcttcccaattagtctctgctaaagagtgataattggggagataggattttcacctaccttgtgaacagtaaaaatacccatttttccaccactgaagctatgtgtattaatattctatgctttcagaaagaaaatcccacactactgtgattcctgcttaaaaaaggaggtaatctaatgcccaagtaaaaacaattttatggtacttttatgagcttctgggaacaatggccatgtgatgttcagttgcgtgtttcatgtctgatgactgagttcacgtacgtcttagaggctaaatttggtttaaaatatcttacatcttctcaaattccttataacaagagcagtaaattaaaattaaatttcgaccttaaatggattgcatgttttccatttgtaatatattcgtatggttcaaaaatctgaaagagtaaatgagtacatagtaagagatttccttcctacatccccatcttcccagctccttttactccccctcccttctgcatgaaaactactgttactagttttttatgtgtccttccagagttttttctgcatatacaaacctaaaataaacatagattcttattctcctactttttacaaaaaatgtagcacattttataaatattttgcctcttgatttttttcttgcttaacataatatagagttatttccatatatacatacatagggacatttcttaatttttttatagctgcatatcatttccttgcactgaagtaccataatatatgtatatttcacaattacctgattcatgtatatttgactagtttcaaatcttttgatattataaacaatactgcaaagaatattatatatgcataattttatacagtaggataatttcccagtattggaattgctaggttagagtacaagtttatgaatgttgatcagcattgtcaaattgcccttgtatagggattgtgcttagttcggctcttaccaggcttatatgagattgttcctttttcctcagccttaccaatagagcatgttgtcagcctttggcattttgccaatgtgataaatacaaaataatacattagcaaatttttaacctgtgcttttcttattatgagtgaagtaacatattttcatatatttgagtgatgttcctctatacatgatttgtatcttttatttttttcaacattcaaatattttattgttgatctttttattatttatttctataggcttcatctaaattgcaccttttcctgtgatataaagtaaaaaatgtttcagaattatatcatttgtattttgactctgagtatcatctttttttctatttttgtttttttgtttgttattttctgaagaattggttgaatttttctagttcatttttcttcgtggcttctggatttttagtcataattagaaaaggctttccccttccaagattataaaggaaatctcctgggattttttgtacttttgtattatctttaatatcacataaatctctgattcatctggaattggcttgtagtaagaagtttattttttctttatatgacttaattattgaattgactatctttttcccactgatgtaagatattacccttattatacactaaattcttctctatgttgagcaatagttttgaattttctgttcaatctctttggtctgtttatttatgtgccagtattcagggactatatgttttaacatctagaatttctaaactacctttaataactgaaattgctaagctgttttcctatttaaaagtttttctgaatattcttttcttcttttttctttataaacttccagattaacttgttttattcaaacagctggtgttttaaaaatagaattttattacattttcaaattaaattgctgtctttatgatctcgaaatttattctcaaaattatgatattactttttcagttgtgtaattccctttgtttcctctaatggtgctttaaatcatcatataaatcttgcacatcaactttatcagctttatctcttggtattctatctttttcatcactgttgttagtgatttctatatgttgattttgaattctattttactcatcttttattgcttgtagttgtttttcagttaattatcttttatcttccaggtgtataatcatagcttctgtagtaaataattcctttgttttcctctttccaaatttgtatagatttaatttggttgtaactcgtctaatcgctttggattgtacctagagatcagctttaaattttatcagtgatcatctttttcttgtttctgacttctgggattctaaaattttgtcataaagcatgataatggtttttggtctcggttggctgtattttattacgttaatgaagtatccatctgtacagtcctagagttgtagctggacctgtgaacaccaccttaagacacgcatttctcagccccgcttgtatttaagccttacttgtatcacctagtgattcatgtgtgcccatgttcttgccattgtaacgtaagtaaaagtgatacttgccatttcttccacatcctttcttttcccttcttgctggcaggaaaccagaagtgatggcaacccagcctcaactatgtaaaggacaacaaggccttcagggatggctgaccatgagatggagggaacctgggtcccagaatcacttcgtggaacagactactcccctgaacaacaacttccgattattacttgagaaagaaaaataaacataattgtttttttttttttttttgagacggagtctcgctctggcgcccaggctggagtgcagtggcgggatctcggctcactgcaagctccgcctcccgggttcacgccattctcctgcctcagcctcccaagtagctgggactacaggcgcccgccaccatgcccggctaattttttgtatttttagtagagactgggtttcaccgttttagccgggatggtctggaactcctgacctcagctaatccgcccgcctcagcatcccaaagtgctgggattacaggagtgagccaccgcgcccggccaacataattgtttttaaagccattttattgttgagttttttgttacacaaagccctttattaccatgactccacatttatagttgacccttgaacaatggggttagagggttaggggcaccaaaccccagtgctgttgaaaatctgcatataatttttgactcaccaaaaacttaagtactaatagtctacttttgactggaagccatactgataacctaaatagccaatcaacacacatatttcatgtattcatgacacacgtttttcttaaatttttctatatttctagtctgcacagcaaatctccaagcaatttttatgtatatttattttttaaaatctgcataaaagtggatttttggagttcagacccatgttgttcaaggttcaactgtagtccttttttttttaggtgattttttatttaatcaaatgatttatttttttttaatcaagtgatttttttttttggtcaaaaacctttttcatctatggaaattatcttgtgctgtatctctagatatattcatataaattatattaatggttttacaatatttgaccattcttgctttccctggaataagtcacatttcatataacgaattatttgttcaagtgcttctgggaatgtttcaccgatattcatacctaagattcgtcagctgtttttgtttcctgcagtctttataaagttttgatattagtgttactcttttttgtagaggaaagaataattttttaaaatttttccttgttctggggctattttaaaatgctggaattcactgttctttaaaaatgtggtagaattttcctagaaaacttccaaggccagaggtttcagagtattaataattggcacatttctctaattcatttgttgaaatcagattatttagagtttctatatcctttggggtcagttttggtgaattatacattactagaaaattacatatctcatccagattaaatttattttggcatagagctgaataaaatagtctcttttggcttttttatttttctttgtttttgtggctttttaaattcttattttcatgtttgtagtttgttcatatttccttgaatagtttagctgtgcttcatacattaaatatttttcttaaaaaataatttttaaaatgtatttattctattttttccctaactccataaatattaactaccctcttctccttttccattgattttttgttcttttctataaatttcattcagaaactcaatttccttattttctttattcttttaaattttttaataaaaattaaatgctctgagttttcctttgagcagtgctttagctatagctcatgaattcaggtatgatgtttccattaatattatatattcagatatatcagattgcataactctttgaagagggaattgttttggagggggttttaaaattaccatgagaaaatttttatttttctccagttttatcaatttctatatttaatgtatcatattaagagtatgttttcgctgttatttctagaatttgcctatttctgaaattttctttatagcctcatatgttatcaattttaataaatattccataaatccataaatatggattgttgaaaagaagataggtctttttatttctaatataaagtatttttggtatatcaaacatccataacacattaatgatgctactctattctcatagcttgagagaagagaattactctcttctcactagtgtgtttctgtctcttatttcctgtaatttcaggtttgtgaacattttgctattcataacaattttttgtgaattacactctcttgagttatacaatgttgttttttgcatcattttgggcctaaattcttgcttgtctaatatgaaaaataagaccatctacttggattcttttctgttttgccagtatatctttttccacattttaattttaattattgtgaatcagtttgttctagctattcttttaaacagtattgagcttggttttactttctcattcaatctaaatatctttgattttaacaagtaaatttaattgattgatactgatatagcaggtatgtttgttctgagtgctgccatatgttaaattttttgctttcatgtttgctttatgttctttaacagtctttcattatgttgtctgtgtacttccctttgttttaagtatacttctgatatgtgtgaaggtgacatatttattctattggctatctttataatttagttgttaaccttttgtaaactatgtttgtacttctatcagtttttttgatctgctttaatgatattacttgatttccaggaattttagtaaaataatcaacaaacattttcaacttcctaatttcttttcccctccttcgcatttttaaaaattttaccagttctgcttggcagagcacataatattaacattcttttttggtcatcccaaccctcaaatcttttctattatttccccagtcatatttatttggctgaagaccacctactactgtcgtcaagaaagattaaatcatttttgtaagtaaaagctgtttgttgcctttattcctaaaggacaacttgactcaaactttctttttctgaggatcttgtagatggtgctgttaatacatgttttatggtgttaaatgcaactgtagagaaatctgattttcatgcttataagtaatttactgtttttgctggactaccttacatattctttctttaccatttgaagttcaataactgtctgggttgtctacactgggttagtttttccttgcctccagtgtacctttcaatatgtatagtattattttatttcaaagacttttggggagcttatatctttaagttgtctttatgtctctctgtttttcctttttaagtactctgtcttcttctgttaaggctgctatcacaaattatcataatctaagtggcttatgaacaacagaaatttatttcttacagttctggaggctgagaagtctaagatcaaggtactggcagatctgtgtctggtgagggctgcttcctggttcatagattctgtcttttcactgtatcctcacgtaatggaaggagcaaagaaaccttcgggttctcttttatgagggcggtagtcccatgcttaaaggctctgcccacatgacctaatcacctcccaaaggtcccatctcctaataccatcaccttggaagttagggtttaacataggaattttagagggacataaatagcacactccaaatacgtttgttgtatctactttgcctgtcttctgtatccgtcatctagtctctcattcttttcaagtctttattttcattttattttgttctcctttttttaattagcctttatgttccttattctattttctgtagcttttttttatcatttctgtgatttcacgctattatttcttgagctctgacaggttatatttgagcatttcctcttgacttcctgtttcttcttcatgatcttttttttttttttttttttttttttttgtgatggagtctcactctgacacccaggctggagtacagtggtgcattctcagcagctcactgcaacctctgcctcccaggttcaagcgattctcctgcctcagcctcccaagtagctgggactataggcacgtgccaccacatccggctaattttttgtatttttagtagagaaggggtttcaccatgttagccatgatggtctcgatctcctgaccttgtaatccacctgcctcggcctcccaaagtgctgggattacaggtgtgagccactgcgcccagcccatgatctttcttttaaaggcagttgcttcatttattttacaaaactaatgacaaaaattttggttagacttttcattctgtcattgaagaaattcttgtgctctttgtctgttggtaagtgttactgctcttttttttcttatagtaaccgcatatcagtgttgttccatctcctttgctaatgctcaatactgaatgaattgggtcttcatgccttaggtatattagcagaggtgtttgtgaggtgggaagatctaggcagtcttctaaacttcacatctgaaaggtgttctcattaggtggttccacagagacagtgtacttgctgctaatatggccccttcttcaatctgtctgtctattatgaatcaatcaatcaatcaatcaatcagtcatctctctgtccatccatccacccatccatccatccatccatccatccatccatccatccatccttctttcttttctgcctctctagtctaaactgtatttaggaggcttcagcagccagccctactcactgccatactccttctaaatttttttttttttttttttttttttgagacggagtctcgctttgtcgcccaggatggagtgcagtggtgggatctccactcactgcaggctccacctcccgggttcacgccattctcctgcctcagcctcccgagtagctgggactacaggcgcccaccaccaagcccggctaattttttgtatttttagtgtagacggggtttcactgtgttagtcaggatggtctcgatctcctgacctcgtgatccgccggcctcggcctcccaaagtgctgggattacaggtatgagccaccacgcctggccactccttctaatttttaacacatggtgaggtgttgcatattggtatattctactgttattgtaacttcttttccatggtggtgtatttttgttggtattttctgagaactgttaatggtaagctacttaacctcactcttcacttcattttctccttaatttatttccttttgcttctatcagacctttgccctattgacaggatagttgagtataccaaaaatacaattttagcattgcagggtgccacacatgttgagaaaatatttttgccagtgtctttggaaatttgcccttgaagaaccaactattctctgtttcttttttttttttttttttttttttttttttttttttttttttttttttttgagacggagttttgctctgtcgcccaggtcggactgcggactgcagtggcgcaatctcggctcactgcaagctccgcttcccgggttcacgccattctcctgcctcagcctcccgagtagctgggactacaggcgcccgccaccgcgcccggctaattttttgtatttttagtagagatggggtttcaccttgttagccaggatggtctcgatctcctgacctcatgatccacccgcctcggcctcccaaagtgctgggattacaggcgtgagccaccgcgcccggcctttctctgtttctttataatgatttttctgtacaatatcagttgcctttgggagactatgtatgcttggaagtgtgaacattatatctgttctaacttttatgattaaggagtttatttttttcctcatttttttcttttctttgttgcttttgtgtaatacccagcaagtggaaggttatttattctgatgccttgtttgtactgtaatttgaaaactgacattttgggataattttatttattttattaagattttttttgtattggtggtcatgtatgtagtttaaaatgaagtgtggatttttaggctataaaattagccagggtttagaatggtaaggtggataaagcacatttactttttttcctccatttttccttttgaatcctgatgagtattatctagttttcatttttggtaagttctccacattcatggactgctttgttactattctgaccataaaatgcttgaatttagagttctatgtgagaaaagtgatccttgttgtgctgttatgactaagcatattgtataccacagttaggaaataaaaagcactttgcttcctgagataaatcatctatatgcatctatccatgtatctatcaattcatctatctatctgtctatcaccttatctagtactattccctcaaattaaggaaggcttgagctctttcttataagttgctaactctctcattgaaataattcattccctgaattttgcaaaactgacatccataaatttgtgatgacccttgaagatatgattaaaaaatgaagaaactgttctaccatgaataggctaattgtaactttagtagccttgtgatttttttttctctaaatacccgctgtgtccatttgtcaaagatccttgcaaatatttaaattttgcatataaaaaatacctttcaaagaatatttttatgtctgcatttttcttttaccagtgacatttcactgatcatagaaatgaaacccagagttattgctatatttatgaaaggatgaatgtataattgattaaggagatctatttaatataaagcttataattagggtcatgataaagtcttgaattgtaaatatatgttgtatttattgaatagaatgcaattagagaatacaaacctataaaatatgtaatattagaggtggaaacaagacaaagtttctttgacaaaaaggtgcatgtacatagatttaggtcagagattgactaatgcttaaaaataaagaaaaaatgaatcaatttaattgagataaatgatccatgattaggataagagaaagtctagctattcaattcagagttcacttgaatgcatgggctgctgtcaagtttttaataaaagtacagagcagcttcctaacagaggtatgaataataagtttatatgtctctgaaacaatgttaatataattgaatcaaagaaataattaaatgtataatagtcttctatttaaatttgttcttaacagtgcaatttcttatttaaattctgtattatgaatttaattatttttgtcaagattttaaaaaatcattattataaccagttggcaccataattacttttagggaaggaactgtgttgggtgcggggagcaaaacttggtaagtcacttgggattaaaggtgtgggactttgaggatagagcctccgtaacaggataagttattctacatgagaaaatgggaagtgtttattttgaactactatatggattgggattggaggctgaaggcagtcttctaggtatcaaagggcagggaggttttacctgacatatgaattattgtttcatgtaaatatagttgaaagtcatatatatttagaattttaaatacatagtttcaagacagtgcttttaattttttaagaaaatatgtgtcatttattttttccaaagctagtggaagtttctttgtgtcctaatagcaattgcgtgaatgaaatcgacatgaataatacttccagttagattttcataaactgacagatagtttcataaatacccaatatgtaatgatagtcagagggagaagctatattaagtgtgtatttcaggagagattgtcctctggagcatatactagcatcaggcagctgctttatggaaccacccaccaattcccttgggttgttgttattattgtttgttttttgtattttgtttagtttctagggaacataattttctttgtgtttctttttgcatgatgctgaccaagtcatgttcataaatcacatatgttgatatctacagtgctttcattggccttccaactcgagcatggcaaaatatgcttattttccttcagaagcgcatctttgtgttaactaggcattaacaatatgtgcttaatagcaattatcttatttctaaggatctcagagttggtttggcacattgcctcagtgctcttcaaacattatcagagaaggacaacataaacaataagatttacactgtaaaattagcctccacttacaaattcttttatcagccaatccttatcttaataacatatattaccttttattaaagtaaatatgtccctcagctctagcttttttctctgtatttttatgtacatttatggagttttactgaaatatttagaagactactgtctaaatacggttctaatttttaaaatgcataatctttagggtaaagtcttggagagtggcaagtttaatcaaacagtaacgctatcagagataaagatcataactcgcattaaattctataatttaaaataaactatgtctggtatgtattcagaaaatgtcagagctagaacatttagttcagtctctatttcatgggttaaagaaaagaaagcttagaacagtgaaaatacttcctcaaggtaatacttacagttcatggctgaagtggtaataaaagtcacaaccaactttttcctctctgctttcttttctttctgttctgtcattttaagtttcttaaaggaaaagcttagagaaaattaagtattgatgatagagcagatacaggattttcaccgggtgcagtggcttacgcctgtaatcctagcacactgggaggctgaggcaggtggatcacttgaggtcaggagtttgagacaagcctggccaatatggtgaaaccctgtgtctactaaaaaaacaaaaatttgctgagtgtgatggtgcacacctgtaatccctgctactcgggaggctgagccaggagaatcacttgaacccaggaggtggtggctgcagtgagccaagatggcactactgcactccagcctgggcgacagaatgagactccatctcgacattaaaaaaaaaaaaaaaaagaaaaacaaaaaaaggattgtgttaacatgggggcctgggtgagaagagaaaatttatttataggaggacatgtaggaagggcactgaagattactgtttaccattttgaattgtccctgctccagtcttacaaagtgggacatgcattgtgtttcttgggcatactcacttccctaagaataagctgtatcatccaatgctatttgcacagaactcacggctttatatttactgtcctaaaataagtgatttacaatcttttaaactttaaaacagtaaatttgattttcagcgatgcctttttttttgtcattttaaggccccctccaaagtgttgtaacctagctgaatgaaaaataagtggcatttttgttgttattgttggtgatgatacttttcatggcaatctttgagatacctaggaatattccaagtttttgaaaaatcatggttgggaattaccactctggaaacagattgccatggttactgtgttaatgctgtgattaatgcgtcttttagtcttgtatgtgtgtgtagatgtagacataattctatattctagtttggttaacatgtttgatctttttctatcagtcagagacataaaaatgtcttgactctcttaaaaacaagactgttcccattttttaacctaatggatatttgttgctgaggatcatttttttgtaaggagtgaaatacccagaaaactaaagtggtctagaagataactgctagttctacatttttttttttgtctgaagttgtgtttgaatttacttcctttcatcacttagtattaaaagaacagtgtgtcaattatagataagaattctacatcccctgtctttccctaagtacctgcttcgaaaaatgggtgcaactagactcagtagctagatgtggtatgtggaatgtggattcgttcgtatcaggcatgcttcttataggaatcctttaatgcactcagtcacccagagcagtcaaaggcctaagctgcttcatactttatagcagggcacagtcacttccataaatactgtgcactcccaagtaaatccagaatgtttgcaacaggatttgtgtaccatccccaattctctgttttcttcaataaagtctttgtacacaattgtttgattgtttttatctcttgatactcacaaataatgccactggagaaataaacctaagacatatccaactggatcactttatatacagagatataacatttcaacaacagaagcctttcttgttgaggggatgcacatttggaatactctcaaatgattattcgaaatcaagaaaaagagccaatgagaaacagcaaaacacaaatatctctaataaggaaaaatatttctgcaatgagatttttcttagatatatatgtgatgattaagagcatttgtttatattgtaggttcttgtcctaaacttacaatagtaagtgtagacaacactaattgttatggtaaaaggtgctacatgtgtgtatgtatgtatatgtgtatgtatatgtatacatatattatttggatattccagtcagtggtacttactgcccttggttaatgcataattgtcttgagaaaatgattatatgtatcagtgtgatctggctaaaacaactctctccaactgatcacctgattttgtttcatttccccgggtaatctggtaggtggccatttcttttctttctagtctatgttccctcctaaagataaaacttggtcaaacatctatttatggtaacctgtctttaagatagtttcaggcataccttcttcctttaatctcatttggttgatatgttagatcctttcctatcagccagagaaataaaaatgtcttcagtgtcttaaacaaaattgtttacattctttaattaaatggtcattttaaggagagaaatgctcagaaaattaaactgagtatagaaggtaactgctaattctacatttcttttctgaaattgtgtcttcatttgttttttaaaaatcatttagaagctgtgtagcccacagagaagttctcaagtttgtggaaaagaaataattaagtcccgaagttaggggtagaagagaatggagctttgttggtcaattctgacatcttagaacacctcagtaatgtggttctttgaaagcatcaaatcgctgcggttactttagaaaggtcatttttagaatgcttatactacttttcccccattttgaaggtcaactggggtttattttaagttagtattgatgtaaaagatggcacaccctcttctggggcataaatgcttgaggatgagccatagtcatgcatgacatgtgtcaagataagaaatggaaatttatctgcagagactaccatatgatgtatgtgtaaattttcagtccctgggattatgatttttttttttagtgaagacaaatgttttttgttagttagatcctgatttttggcatgatttagtaggagaaagaaggttttagtttagacatagcttttcttacatcttgtgtaaaattgtcagttatagggagggtaaacactgcactctggaaaggccttctggaatgtccttatttctgtgtgagtgtgatggaaaaaaataacttttaaaaaaatacatgtttaatgaaagatatttccaggttattccttctggattttaatttaacgcttgtttgtatctctatgatagcatgtatgaaaatgtattttaatgatttaattatctccccatattagatgatcttgctatctttatcatatgccctgtttatttttctattcctggtgataggtggagtgactgatacattgcaggtacataatatacatttttgagtagatatgtgtatgattaattgacattttgcaagcctttttttccaacttttaagttctggggtacatgtgcaggatgtgcaggtttgttacatacgtaaacatgtgtcacggtagattgctgcacagatcatcccatcacctaggtgttaagcccagcatccattagctattcttcctgatgctctccctcccacccctcaacagtgtgtgttgttttgacagaccccagtatgtgttgttcccaccacgtgtccatgtgttctcatcattcatctcccacttatgagtgagaacatgcaatatttggttttctgttcctgcattaggcaaaccgtttttttgtttgtttgtttgtttttgtttttgtttttaaagaaaaaagaaagacatgctatgaaatggccttggacctaattcaagaaacgaaagaaagtcagagatcaaggaagaaaggaacaatgcagagtttatggaagttagatgttaagatgacagctgagtatgcttcttttctcctcacccttgtttagccaggtgcttacttgacaatttgtaaattaaattattccttgaacaatattttgcacaggagtaaaggaatgcttcatggataaacagaggcaatacctggagctaatctttgtggataaatgtgtttattttgattcctgaagctgggatgcagaactgatagagggaagccagggggttttctctgctccaccaaataaatcacatatgactagaaattgcaaccagacagcaatctgtgaagcaagtgataggagctccaccgtctggtgcctgctgtggatgtctggcacccattggtaccagatttggtgtaagtggggcttctgtttaggaaactttgccaatttttttttcttgaaaagtggattttggctttgtttctgcattcttatatgggaataaaaaaatctcataattgcaaatgtgtttattatgccccaaacattagatctaggctattctttccataggatattgtaatcctgtgtgggtacatttgctgctgcatttgacacagtaaagttgtattaatgtttttcattctgctatcttttagaactaagataggcataattcctaatttatctgtgctcccccttatgcatacatttaggtagtcaaaccttgagagtttctatagaatatttttaaaacttacctttggtctgtcttatccttggaaatgttttcacgtttgagagcatcacctcctatcagatcattctgttccttgaccctctccctctgacaaatttcacatctttcttcgcaggaaaaaagaaactaaggctatatcatggctttcttcactcctcttcattctgatatgaacatttgaagcaagcattgatttttttcttccttcttcttacttttgccagaacccatgatgctgtttattctggtggggtgtgtgtgaaacgcatgttgcagttccatctctcttgaccttttctttgtttgctatgtatattgcatctcctcagttgtccaggttatcgcaagaaattgtgctggatttctactcgctcaccttctatttcttactaaatattccttgttgtatcataatccctctcaccagaattcctcctgtgtgaactcatagattacaatctacattgctgcaagagactaccaaattttccatctttctcaggtttctgcaccttcactcactcttatatctttccaaactttcctttccatctttcttaatgtcaaacctgattagtcattctcctgcttaaaatcttccaccgagttctcagggctttcaggttgaagttcaagctcattagtgtgacatacaaggctcttaggacctggtggtctcagcccctggctacttccctaaaacactgcccactcagaccagatctaactagttttagttccctatatcatggtatactactgcgattttccatgtgcgcttactttactcccaggtctctctatcctcttcctcttcatgtaactaatttcttcctggctctttgacactgggcatcagtgtcatgtccccagtgtctaatgtgatgtctttcatctgttctcttataggcttggatgcatctccttcctgtcatcttactagtattattgttcactgtccttccacggtggcacagagtccccagggtatatcatagtattgtttgcaaaggtctactaagagtaaatgagtaaatgaatctaataattttttattgctttaagtgctctgtattttaattcactgcctatcaagccttgctctctttgaattatatttatgtctaaatgttcatgatagcatcagattgaattaattgtagccttatatattgactctcaaacatgaccaagactgttattgttgactctatattcagacaaataaccagacacatagagtaaaagagttaacccatagtctgtatgacctaatgaaaagagcttagacaagaaccaaggagcaacagtctcaaatgtcagatgcctttgccatattactcccatttctttttttatagttaaaaatgttaaattttaaaggttaatgtgatgctgctaagccctctgtagggtgattgatcagcttaaatgtaaactattttggtgaccatgatatataaagtcatagtgttgaaaaaattcaacaatagttagaatcattttaagaaaacaacattgatatatgaaaatattcacaattgagaaatcttatattgatgaacttagagattatacattttggtcttgaggcagaactcatcttagtaaaactgcttaagaacttaatcttgatcttataaaataaataaagatggtattttgtattttaaactattgagtatgatttcttgctgggatctatcactatgaaaagtgattattggtttagagtggtgttctcgttattttgggttttgaaggagcacagttcatcctgttggtctgtgttaaccaggggtaggtaaagaggacagaggacacctagcaatggctcaggtattatcagtgagcagggtgagaaaatccttgtgtaccaagaggaattttgtcatggatttgcagaactttcaaaaacaagaaacattatttccacttttcgtgtgattcctctcactttttaacctcttttctcttttccttcttttcgagatggagtcttattatgttgtccaggctggagtatattggctattcacaggcatgatcattacacgctacagcctctgaactcctggctcaagtcatcttcccatctcagtcttgagtaactgggactatagatgtgtgctgtggtgcctggcagagcctcttctttaactgtaatagacctgcttatcatgcatgaaatgatctacaaacacaaagtaccctatcatcattatctctttggagtactatgtcctttaaatgtattttcttactgtaactaactacctaggctggaggtcctatctctaatttagaaatgaagaaagtgagacctacttggattgagtgagcattcgaagtacattcagaagtggaaattatttttaaaagttaaatggcttctagaggtcatgtagtctcttttgtcatatagtggagaaaacagagaagttcaagatttccccaaacgttcttagttactggcaaacaggagctaaatgtcattcttcctggattttagtcagtatttgcttggtcacttttcttagtagagctttttcttctccttgcattcataaacacttaataaaagtgaattgataatgatcatatatattatataattaggtaatattagccgggcatggtggttcatgactgtcataccagtttcatatattagaagaaaagtacaaattgtgtagctactcaagtgcaaaatgtagagagaaaacctagagaagacatgaaactctctccttgactaatatcttcaggctggggatactatgaacaatggtgtgttcagaaagaatgaacaaaattgctgtagtaactcaatttcagaagagtttgaccctgtcagaatcatctactgtatttgcatgagaaatatgaaaggagtccaagggaaagatgatgtgttcagtgttcttttccactgcattggagcacctgaggagctgaagagagaaacttgtgtttcttctttgagtggcaagtgtgttagttaatatcatcaggcagaacatgctttccaagagtttagtttgctccttcacaaactaaaatactctgaagtgcctgattttatgcaaattacttttggttgttgtattgagaaatgaaaggatgccaacatttttttttataaaccaaatactaattagcattaccaaatttatctgttgagatacaccacttatttgtaagagaagctctttgacaaaatgaaagaatatgaataaattcttcacactggctatatgagaccttggaatgtcattttcttttttttctgtagaatttgtgtaataccctccactttgttggactgaatgagatgcatacaaaacaaccttgtaaattacagcattctaggtcagaggctagaaatattttctgtaaaaggcaagagagaaatattttatgcttttgtgaaccataggtctctgttgcatctactcaactctgccattgtagtgtgaaagcatccatagatagtacataaacaaatgagggctgctctgttccaataaaactttatttatagatacagaaatttgaatttcatgtaatcttcacctattgtgaaatgttatttttctcttgatttttgtaaccatttcaaaatataaaaaatgactcttagcccacaggctgtataaaaacatgtagatttggtccaaggtctgcaattcactagcctttctccaggtgactgcctcactatgaaacagttccaagtataaagggattaggatatgatgctgatgttgggattgcatttactgagctatctaggtgattgactccaggctctctctctgatactgagaacatgccttggcatatgttcccagctaacgtttgagaaaactcattttcggaggaataattttctgttgtttgttgctgggagttgggcagaatatctcaggtagtggaaggaggatactgcaccacacaactcatagaactgaattgatacagatagatgtcagcatttctgtgcaaaaacaaatgtttcaaagttttgaggtctcagcacttttccaggcacagcattctggatcttggcacacagatgactctcagtttgaatagaaaatgctcacctttctttttgctagttttattccagagccaatctctttataataaagaaagcaactgaaaatggaaaactcactgagcttaaagcagccaaaggaaaaatatgtgctcattttaagttttttcttttgcaactcttggccaaataggtttatttttaaatacttttcacaatttacaaatgtttgccttaggactttgtgtaatggcattggttttatacagctattacagttagggtgaagagattttcttcacagagatggttttggaaaatgtctcatcacacaagtggtaagtgtagtcgctgtaattgtattgaagaaaagaaatgactaatgggaatcacaaaattgtgaaattgatgatcatttctgtttttattgcctttattttaaacataatagtgacaaagtctgaaacaatatttggagattgctacatatttaaatatttaatgcaacaagcatcccactttattataggagatagaacatcgactgtgcctaacctaaattacttttccagggggttttagtggattattttcctattaaaaaaaggggaaaaaagaaaagaacagtctggtacaaagtataggtgacggcttcagctttgtaattacctattaattgatatctgtatataagtataacaaataaagttttaaatactgaaaatgagatgagagatactaaaggaaacaatttcctgagaagtattaggttagactgtacaaatgtaaaaaacatgtcaacaacctggcagcaagtagtcttgagaccttgaagttcaatgagagcagatgaattgtctgctcttttaatagtaataaaaactatctaaggcaaaattttggcatgtaacttaagaaacttaaaaagtttctcatgctttaagacactttgattttattagatctagaatgaggtctgggaatgtatatttttataaagctccactggtgacctgggtcaagttttgcaatacagaatttgaggcagataatattatgtaggaggtaggagatttattggggagtgctagaagtaccaataccagtgggggagtgaaaaaagcatgtctgtagagcagaagaagctggactgcagagcagttgcagtagaatcccatctgatcctaaggagccctggagctggcattccaggccctggagagttgtcctggaatgaggcaaggaggagggtttgtacccttgcattcatcagtcatgggatacaggatgccccagggagtgggtgaaaacttgagggagatagctctttccaacagagggtagtgtccagagaaggtctggttatgaggtgtcagaagccaacacttgcaatcattggacgaatttcagtcctgaagttgtttctaggcagcacaccagtgtgtccattacaacaggctattcttatgattgaaaaacgattgtctaaggggttgttgggaagaagtacttggactggagggtaggcaaggagtatttatctgtttcttaaacatgtacggagtgcctactatgtataggtactagagacataaacatgaagagataagttccctacatttaaggagcttaccatctagtgggactcagatatgtaaataaataattaaaacataattgtcaaaacaggagggtatgtggtatgtgcatgtttccaggttttaaaaaagctttacttcacaaacaaaaatgttctgttcattctgcttattttgatttgatagattacagctcgcagagctaatattctcttaatgtaagtttcttccccttcacagatgtttttccatctcctctaatttctcatcgttctgtgatgagacaaccagagtctttaaaaaataaatactttgcttttctatgattaaatggtttgatgaaaattaagccataagcataaagtgctaaatagaataaacccctggcacataaaatgggtaggtcctgatatcctctttcaattcttcaaatgtataggtagatactgataccctgtctcaactgtagtcaattacactatatattttcctctataaaatgtatcactggccacgttcagtagccctccattactgaatggggcaattattcaagaatgccccagtgaatgcctgaaactgcacctggtaccaagtcctacatatattgtcttttttttatatgtacatacctatgataaagtttaatttataaattaggcacagtaggagattaacagcaataacaaatacaatagtaaaacaattgtaacagtataccaacatcactgctcttgtacttcgaggccatcatgaaggaaaataaaggtgatttgtacaagagcactaggatattgtgataacgcagacatctcctagacaggatctactggacaaagggatgattcacgtcccgggtaggagggggcaggacagagcgggacagtgggagacttcatcttgccacatagaatagtggataatttaaaaattaggaattgtttacttctgaaattttccacataatagtttcaaaccaagggtaactgaaaccatgagaagtgaaactgcagatatgggaagactcctatagaaaatatttgggctgggcatggtggctcatgcctgtaatcccagcactttgggaggctgaggtgggtggatcatctgaggtcaggagtttgagaccagcctggccaacatggtgaaaccccgtctctactaaaaatacaaaaattggctgggtgtggtggtgcaaacctgtagtcccagctatttgggaagctgaggcaggataatcgcttgaaccccggaggcagaggttgcagtgagctgagatctcgcaagtaattggttatttactacataaaaatgttacgtagtattcatatttatgtttgattgcatcacttttttttaaacttttggctcaaatattggtagttttcaaggaacttttctgcagcattatatgaatatgatgacaagtagaaaaaccaaaagggtgcatcaatgtatgaaagctggtgtgttaaattgttatcatcattaacaattcactgctgcatgctaaattcatagctcacacaattcaatttatgccttataaaattacaaactattacaagtcatggactttaaggttgctcaccaagttatcaagaaggtcaaaggtaaatgcaactgtactattctatggtaatttttcacaaatcccattgattcttgtttatgatactatttcataaaactcagggtcatataataatgttctgtttcaaaacatgttggtgtatttcaaggtctcagaaaaggtattgaaattttttggtgagccaaagagaacaggaaagatgatgttttgtctgtaaattccatgttgactctgagttagaagagactctaagggtcatctggttctgggctgttagttttgaggtaataacgttttcatttacaaaaagaacattggtaaagtaataaaagcttatttttgtatatatacttatttacgcacagattatacatgggaaaaatggtgcccaggcagtttgctttcagtgatatatgttaggtgaaggtcaggaataatattgacataagtaaatattggaatagaaggcaagacttggaggtgggatttaaacaaataaacaaagttttttttttttttcctttttatgctactttgcaggaaggtcatgtcaaaattaaaatagattctgctttctaccttggcaagtaacatgtattatgcccactcacatgtaggtcttatctgctttggcaaatacttacagaagaaagtgtaatttggaaagagaagaacataatgatattagacaaaatagggtcacaaaaatttacaattggaaaatgatttgtaagttaataaaattacctagagccagattctactgtctaaatataccactgaatgtaaacaagcttttgctgagctagtatagacaggtttgaaaaacttggttttctccagtactcactcttatcaaggaggaaaaaggcccagaaaaaaaattctgaagagtatttttgtatcatttacttatgccccatctttttctcaaatatatttaagacagtttatcagaatacatactatgtaagaaaataacataaataaggaaatcagggcaaacagaatgtaaggttttgaaaatgaaaaaggatctggggaatctgaggataaagttaacacaaaaaatgcttgaggatctgttcatctgctgaatgacggttacaaatctgtaaatattctgatagccaactctaagagaaaaacacagttatttcaatgtttatagttatcctggaggagcccaattctttctctaagtgggaccagagaaaaatttcccctttgtcctaagaaagaattcctacggagtatagggtaatcaagaactcatgaagctgtgtgtcctgtaatgccccttaagtagttagatgattgcaggccaagagcaatacagtcaaactgattttaccaggaagaaaaagcagtcagtccaaaaacaacattcttgtggtttgattaatccaaaattggttagattcaggaatggaaatctgcatagactttaggcaaacctcaataattatttctgtaaccaagattctgataattgttgaggaagtagtgaattcaagcttatgctctctgtacttcctgacaaatccttggagtgcatcactgctatgttgttagtgcgtgtggacccatatgcctttgatatttgccaggctggggatataaatgacatataaagatgttctaatgagggctactcactctcttttctctctcacagacacattcactcatgcccatgtatatacagataatcatatagacatatatacacacacataactattgaataatttgttgtttaaaaaatatgtttcaaattaatggggaaagatagattggggaacagatgggcgtcagacaatttgctatcaatttggctagaaatcaagttagattcctatcttacaagatatgcaaaacatagaaggattataaagtcaaattaaaaaacaaagtattagaagaatatatggagcatttttatactcttgcagtagggaaagatgctcagagcaaacatgaaatccagatcccataaaataaaaatacgaagtacttaggcaaaaaccaagaagaaataacaaactttggtaagacacaaatgatagtaaatgtataaaagtcaatataagtaaaattaaaagagaagtgataaacttggaacatgtattctaaacatacaacatgaagaagcttagtatctatgatttttaaagaatgtcaagatattaatatacaggaaaaacagcagaatagaaaaatgagtaaagaacatagtttttttctttttgaattaattgaatttgaaacagcggtttttctccttcgaggagtaggacttttcacaaagcttcagtggattgttctaaatactggaaatgatatggagaagcacgtctcatctttctggaaagcgatttggcaatgtatatcaaaccttaacattacaaatgagcagacccaacaaatgttcatataaaactcacacctaaaaatataccagacatgaaggcaaagctatatatacaaagggtgtttacagaaatattattcttatgtcaagtgtggaaaatactaaccgaagtccacatgtccaactgaagaggaattagggtttaatgatttaagaagatatcatgaaactattaaaattatgtttaatgttaattatataggaaaatccttgaggtaaagttttaaaagtaggatacaaaattatgtcatacacacacacacacacacacacacacacattttacaaaaaccaaaatatatgtatgatatgtattgttttacacatggagagatataagtatacacattataaatacaaattaatacttttggtcatacaggatgtctctgttttttgaaatacatttttcaatagttttgacatttttagccataagtatatatcaatagtgttatttgaaaaatatttaaacagaacataactcagttaatatatatgtactaaataaatttataatttttaagggcagaaaagcataaatatttcaggaaattctgaactaaaacacagttgaaaacttctaagactctatatcaatatgcaattgcaatgttaaataaaataaagatgttagcaaatagcacaatagtagttggcatattggaactagaatttcatcacgttatttgcaagacatctaatatgagtcatttgacccaatattttccttgtcttactctgggatgatgatacctctgtcatggggttgctgtgaagagtcagtaagatgtaatcaaccagcgaatgttaggtgctcagtacattttaattcttcatcctctttctctttttcctctcagcacagataccagatgtaaaaatgttatttatttttttcctagcactagtaaggagttgaaagtttttttccataaaaacagtgcccagttcttggtgatgacagcagggagacctttctcactcctcttcagggtgaaggtcagtgggttcgttccagttcattgactggttgttcacagctgacgttatcacgattagacaatgctttgccttaccaattatttaacgtaactgtgcttctgtctttgctcataaaaactctggtttggatacttcactcattgaaagcagcagaggcaaatcatcaggtatatatacagcttcaatgcctaagatattgggctacttttgctagttagcctgtggtccagtagccgcccccacaccccaccatctatttttggaacgtatacaaatggagaaagatacattaggttcctccattttaatctagttatttttttaaaaaaattataagtatgaattttaggctgtaagtgtaattttgttagatggatagattgtgtagcattaaagtcaggacttttagggtagttaccatccaaataacatatattggccagagacagtgtctcctgcctagaatcccagcactttgggaagttgaggcaggtagattacttgaggtcaggagttcaaaaccagcctggctggtcaacatggtgaaactccatctctactaaaaatacaaaaattagccgggcatggtgatgcgcccctgtaatctcagctactcaggaggctgaggcaggagaattgcttgaacccaggaggcagaggttgcagtgagccgtgattgcaccaggccactgcactcaagcctgggtgtaagagtgagactctgtctcaaaaaacaaaaaacaagtatattgtgcccattaaataatttctcattatttattcctctcctatgtccccacccttctgagtttctattgtctatctttttatactctgtgtccatgtgtatgcattatttagctcccacttgtaaatgagaacatgcagcatttatgtttctgtgactgacttgtttcaattaagacaatggcctccagtttcatccatgttgctgcaaaagacatgactttattctgtttttttttttttatggctgaatagcattccattgtgtacctattacatttttttttcccagtcatgcactgatggacacttaggttgattccatattctttgctgttgtgagtagtgctgtgttaagtatacaggtgcaggtatctttttgatataaagatttctcttcctttgggaaaacacccagtagtgagagtgcaggatcaaatggtagttctttaaactctctaagaatctttacaaaatcctgccactgtaggtataaaacaatatgtggtctcacttagaataaaatggagacattttaagaatgtgttgtttgaatcctggccatgttctttcccagaggctacagtttggtgtagttcactggatgtgcctgtggacactgaacttgactggctattggatttctgactcctggaagattttgaggagttgcagctcttgttctctttcatctcccacccatctccagaaaagtccaggttacacctgtggaagggttaccagccagaggacagagtgtgaaggcttgcctggtaatggcaaacccagttgccatccacatgtcatactttgcaccatgtccctgatttgtatgggttctgtacatgtcacagtttctaagagtgaacctctctgcccccccgcccacatgactctgctgtcagctttccaaacaatgagaggacagctcctttgaaagatgtaagttttccattccgaaagatataaatttcctggtcctgcagaggctagaaatacctcttgtttgggtcactggactcgggctaggtgatctgcaagatcttacacaatgctactctaatatttcctctgtctccagctgtttcatgactccatccctgccatgtgtgtgccttaccatctttttaagcagagcacaggcctgggcagtggctcatgcatgtaatcccaggctttgagaggattgcatgaggtcaggagttcaagactaacctgggcaacatagcaagaccccatgtctacaaaaaattaaaaaaaagccaggcatggtggcgcgtacctatagccctagctgcctggaaggctgaggcaggaagatcgcttgagcccaggagttcaaggctgtagtggaccatgatcatgccactgcactccagcctgggtgacagagtaagaccttttcttacaaaaataaagaaatagagtacagattgtaactggcaacagtgagtctgtctcctccctttcctcgggcatcagagtcaaaagaatgacaataacatttgctataattattttaagtttttttaaatgatatggcccacatatagaaaataattatcatgttgtcttctaaaggatttgattactagaattagataactgatttctttctttcaaaaagtggaagcttttttttgtttgtttgtttttggttaactgcattttaaattttaggaacaagtagattcttcttcagtcttaaacttcagcacctgctaaaaataaggattacgtattaaacattatattttcccccagttttctctggatgttactgcaaaaatttactcactctcatttggatcacaggggctgataaatgtgtgtgtttccagatgctgcaccaggactgaacctgtggagtaggaaatgattctaccttagatacacataccctcctctcctgtttttttattctaagtctccctagcctcttaggtttttgtttgtattaccctccctctttcctgcttccagccatccctattatgactctaagggtcccatgaaagattaggtcatctgtgatgctgtcagaggcctggagaagtcctccacctatgtgtgcgtcatggacacctggacacaggctaaaagcttcttgagcaacttggtaatggccttctgaaaaaaaatgcgctcagccaatgtattactaattctactgggggaatttccaagtcaatttctggggactgagagtggtacagaaggatgagggtgtttaggtacactttaaattcacagtgtatgatgtgccctgaccacccccatcctccacacacccactacttactcctaaaacaattttttctaagccaaaagtggtttatgacaaattgtatgtttgcagatttggagtctaaagaggagtagatttatttaagggccatatttagtgttagtaaaagctacacttactatgctaattgcaacttaaattagagctttacctttatcaccaaaaaaaaccccactgtcttcccttgatgttaaattgtaggaatttaaagtaatttaaatttctattttttctacatttccgctttttgtatctgtacaatatgattatacatgtgaatggttaacaaaaactgtatactttagtctttaagtggaacctcagtgcaatattttgtaggcattaaaaatgataagcactttcatcagactattagttttcattttgttgactttgtttgtttagttctttgtggtataccctgtagttataatgaaatgatgtaaatctatatatttgccaacacatagatgtatttctttttaacttaactttttagcattatgcaggaactgctgctcactcgctaattatcccacagcctcgcaagatggcatctcctgttttctagcagatcaggatcaaaactttggaatcatttctctttctcttacacctcatatcccatccataagaaattctctgcatgtatctagaacttggcacttcttaccactttaactgctaccatccgtcatcttttgcctggattattaaaataacctcacatctgtccttttcttgccattttatcctttattcattagccagaatgagccttctaagactgtagtcaaaagtcatacagctcctttactcaaaccctccatgaacttctgacctcattcagtgtaaattcccaaggtccttaccatgaccttcaatgccctttatcatctggtctattaatgccacctgacctctttttctaccaccgccctcaggtcactctgcttcagacataggggcatcactgatgtttcagaagcactgcagaacccttgcactaactgcttccagtgctaagaatgagcttactttgtataagcatggcttaattccttactttctttggtttctgtccacatgccactttctcagtgaggccttcgctgacttccctgcatgagctagaatccactctgcacctggcagtctggacattcttaccttggcttatcctctattatcctagagatgtctgtcttcatccccaacacctagaacagtgacggacacatgatagctacctcatgattatatttgaatgaataaatctttaattatccataattgggtagtagacccaatcttgcacaggcagccaagaaacaaaaccaagaaaaaaaaacttagtttctatgtagacctgccactaactagacatacttccttttgcaggtgtttaacatctctgagtctcaaatgtctcaagtattaaaatacaatagattgaactagacaatttcaaaagttctgcttgctctaataaaatactttacacgaagtaaacacaattccactgatgtttgttcaatattttctatggcaaggccattcctcattatatataactcaagtagataagtagcagttgttatttgtcatatgtatgtatgtacgtacacacacatgcacacacaattcaccctctcccacaatatcactgtgttacacaatcctcagtcctattacctctgagacccattgtaaataaaatgtaaaatctttagagcatgttggacaaatacatggttttggttctgcctctttccagtcgcagacatcactgtgagattatagaactctttccatctaggccaagactgggtctaagaattcttctcagacttctaggaaagatatcaaacttattagagttgaaactagagatgtaacatagattttattccaggttttgggtatctgagagcctagaagtggtgtgagataaagaatttgatacaccttctccagtctttttgcttggttttccttcaattcatccttccaaactcattgtagataccacttctcctaggatttttccccaaatccaagactgtgttatgtggcccttgttatctgattacctagggccctggtctcaattacagaattattatgttgtaatttctttttaattttaacttgactgcatcatctacctgactgtgttctctagaggttcagaccaagaattgcgttttgaagactgagagctgggcctgacacttactagggacacaataaatgttgacttattgaacagataaatgaatgaatgaatgatgcccaggatagaatatttggtactgctgtcctgtctagcacatttctccaaggtaaaattatctcccacatatgacaaaaatctacctttctcttggttaaatcccttagtaagctgcctatcagagaatttgagggttaactcattcttttagaataatgtaaataacttggatgggagcaggctgtatgctttaggtcaattagaccaccttctcatgcctgagggaaattgtcccttaaggtctgttctatggcacctagtcccctaagatttgacaagaaagcgttccacagttcaatatatttggaaaacattgctcgctggcctttccccttgaaatctggccatggacattagcttattagagattctgagtcatctagtaaagaattctgtttaatttttttatagctagaatttttcatttcttttgaacttaaggataatattcaacattatatatattaacattctactggactaatgctttaggaaacagagttttacacacatagaggccatttaatagctttaaataacagtgtagcagccatatggcagtgagcagattggatttggaaaggggtaaaaccagtagggaggatgttgcagaaatctagatggaagaggatgaggcctataaccaaagtcctcatagcggccacggagaaatgaaaacgtttatgcaagaaactgatctcgttactgaaaagtcttttgcaagagtaactaaggtggttagagaacaggaggttggtactgtagtgctttccctcttctgcctttcaaaggtaagagcttgacttcgtttttaagccagcaggggttcttacatagctgagtgtctatcactacttaatgcatgtataatgccctgctgtactgatattcatgataaaaatcaaggtatttacagtcaattataatttcttattctcaaagcatacattgattttcttaaactaggcttttctgaactgggtatgataatacacattattatcataccattattaggcctctctttccaggtctttcagtgaaatctgtgtgtgtgtatgtatgcatttcctaaggctgttggtgcaaagaaacacaaactgggtggcttaaaaacaacagaaaccaaaatcaaggtgttggcagggccatgctccctgtggggttctggcagatccttccttgcctctccctgttttctggccatgtctgtcaatccttggtgtttgctggcttgtagctgcaatgcttcagtctccacctctgtcattcgatggtgtctccctgtatgtctctgtctctctctgtgtacacattttcatctttttgtaagtacaccagccaaattggattaagggtctaacctactccattatgaattcatcttaactaattacatctgccacaaatttatttccaaataaggtcacattctgaggcaccgggggttaggactttaacacacctcctttgggggcccaattcaaccaataactacatctgtgtgtgtgtggtgtgcacgtatgtgtatgtgtttgtaagtgcacacgtaagatgcaccaacatagatgcaaagacgtttgtcttcccaaatttactagtagtatttctggctctactcccatgaaattacctttaccctttctctttgaaggatggacaaagccaggtctgataaagcgttagaatttgtcatggctggtcttcacgcggcaaaccaattatgtgaccacccaggccttttcatcatgcttggtacattcatggaatgttatctcacactggggttggtaatgcaatactaattctaaaaggctattctgattaatgtattcatcttggtttagcattttttatattgtttatttcagctctcctttcccttttgtgatctaaatatattttctttcaggttattttgctaagtggttccgagctaattttattacttttttgatggtaagggtctaggcagagtagcctttctgaaaggcaagctttaccgacttctccaggttcataaatattaataatgtgtaactacgactctgtgtgctaaaacattgttgtggagattgtacaaggaaggcattttatgatttcatggagacatggagtagcaagaaaatggagcaatgacatttggggggagcatgacatctaaatgttaatattgtgtactgcttactgagaatgagaatttctcttcttttgatgctcgtgttgtcagttgcacgagagtgttcttcaatttgtactttacttcttctagctattttttttctttataaaactgctagaaaagaagccagctagtattttgaataaaagagttgggattgtataaggcaatgtttttactcagctttcctcgaccttttgatgaaaattccagttcaaaataaaaagacacaggcactaccctctgagagagtctgtgtgaccaggctatcattcttaagaaacggattgaaacttcttagtacatctcataaaaaatttagttagctataaatgttttaggctgttgcagctgatatcatttgccttgtgggaaaaaaaaatgaggctgttttatgttaagtgttttgttttctcttctctctattctttttttatatgtattaggcaatgcaaagacttttactaccattgttatgatagtatttaaataagcagaccaaacccatgcatgggactgaagagtaaagtcaagaaatatttgagatgcctcttttaaattaaaggtatattcttcattgctaattttgagttcaattttttactgtatattaaaatgttaatttcaatttcatctatagcagatggtatcctgcttttattttctaaagggattcttcaagtaagccctcagttgtcttgcattatgagtaattagagaaataccttggttggtcctcagggcagagctaaaaatagagttcagtgatttttttctgtaattcttactatttttaaatagaagaaaatgataggcaagaaagaaaaggccatacttaaccaaaatgtccatgacttctttcattactaacaaaaaattgccaagcttgacagtttgcaaataactctcccttctccatgaaggtaacttggaattcgatgtgtgtgtatgtacctgtgtgagtgcatgtgtgtgtgtgtgagagagagagagagagagagggaccacaaagtctctgatgttaacaaatacaagaggaagagcagtagatgagggcagaggtgtggtaagcaattgatctggcaaaatcttgaaagttaagacaagaactctgggtgttactctgagatgggaagtgtttcgactcagcaatcccataatgggtatatattcaaaagaaaacaaatcgttttaccaaaaagatacatgcacttgcatgttcatcacagcactattcacagtagcaaagacatggaaatcagcctagggcccaccaacagtagactggataaagaaaatgtggtacatatgcaccatggaatactacatagccatacaaagaatgaaataatgccctttgcagcaacatggatgtagctggaggccattattctaagcaaattaacacaagaacagaaaaccaaatatcgcatgttctcacttacaagtgggagccaaacactggctattcatggacatatagatggcaacaagagactctggggacccttaggggcaggagggaacagggggagggttgaaaacctacctatgaagtatatgttcagtaccttggtgccaggatcatttgtaccccaaagctcagtatagtgcaatatacccaggtaccaaatctgcacatgtaccccctgaatctaaaataaaagttgaaagtaaataaatagataaataaatgcattaacttttttcatgaaaactaacaacaaaaaacctgagaagacaggccgcaaaaaaagaaatatggaatacatttaacctacaaagaaacaatatccagaatacataaggaacatctaaaagtcaatcgtagtaaataacataaaagcaaactgaaaaatacttcaaacgacattattcagaaaatgtatcctaatggccgataaacattaaaaggtgctgaacattcttaatcatgaaaatgaaaaatagaccatactgagatgatcatttatcatccagtattaacaaaaatctagaaattatgacaataagttttgggtaggatgagaagcaatactgctttggggtatacaattgctttggaaataatttggcattagctgtaaagtttgaagatagacctatttacaggttagtagtaccaatcctatatatgctgtctagaaacttctgtacatgtttaccaggaagcacatataagaatattcctagaattactgaaatggcaaaaaactgaaaaaaactgcaactatccaccaaaagtaggatatatagataaatcaatagactgatagattggcagatagataggagtgctatacagctgttaaaaataactgtaatgcagtgttactcatcaatctggatgaatttcaaaaccaaaatgctaagaggaaagtgcaagaagcagaaaagaccatagaaattattccatttctgtaaggtcaaaacaagcaaaattcagcaacatagtgttttgaaatgcattcatatatggtagaactatagagaattttaggagaatgattaaaagagattcagaataatggtcacctgtggagggaaggagggggctatgattggagaaggtcatgctatctacaaatgtgttgttccatttctcagtctgatagtagaaagatatttgaacatattattgttcttcaaattgtatatacattttaatattttataaatatattctgcattaaaataaaaagaaaataggaatgatatggaaccagcaacgacagacaacttttttaagaattttttttttttttttttttttttttaacgaaagctattgtcttctatggaaaatgttgtttgacctattagcacttgattaggttcccctccttttcctgaaacactataacttttccctatcatgtcttgtactaaatttatgctagctgcaatgctagataacactcctccagacaggtcttagtagattaataataaatgtttatttcttgctcaagtaagaggaaaaatgagattacctataagtagcagctcattttcaaaaggtaattcaggtaccttgtatctttaaatctggtggctctgctattttcaacatgtggcttctaaggtctctgtgagaggagaaagaatgggggcttgcacatgtgggacattttcatgagcaaggcctgcattttcctccatatgctgttgacagaactcaatggcataggcccgctaactggtaatgagctggcaagtgttgcctagctgtgtgtgcaaaagaaaaagagacagatttttttttcaatagctagccattttatccatctactttccaaatatccacttaaatctttcttctttgcttaggacccatttaccaagggtgacagtccagtcccatcaccgttttgagctcaaataacaatatctccaggcagtatgcagtcttctccatccattgtaaatgtgccttcttgcggtcttgcaatctctgaattaaaaagacaagttgtctccctttcacatcttcccctctctccagagtgggagacacataacattcactggtacatggaaagaataatattctgcaggagggtggaaggggtcttttcctagcagttctccttggctcttatcactgtaggctagtgcatagccccatgcctattgtatgactgcactgtgtcagagttcaatgagttcaagtttgtactattccctgttcatgataagaactatataatagttaattgctgatagtattattatattacaacaagctcaagtaccaagtgtctttgactttggctgaaattatgtgcacactaagactagttaccatggtcatcataagctataaatggtaattttttctatatattgtttaatatgtgtgtgtgtgtgggtgtgtgtgtgtgggtgtgtgtgtgcacatgcacacatccaggaaaaattattacttgacacctactttttcttgtaaacaacaatttatagtaaatatggaaggaaatttaaagggtctgtggcttgaacatgttggaaagtcttgctttaaagctccagcagatcctttctgtactaaggcacaaaagctatgatttttcatctgcccagaataataaaattatttacaaaagcactgagaattattctttatatgatttccaaccttcaagcttctgtagaaacattgtagctttgtaaaatgtggtgccttaccttggaaaaaaaagctttgttttgaagccgaggaatagtaaagaaaactgctatgtccctagcattaaaatcttatatcctcacaatgtgaacatgcaaattaactagaagaaactacattttaaaaattgaaagatttttttctgagatgcctttgcattttggttatctcttattggtcaaccccaggtcagagttaacacacctggctctagagtaatacacatgtacaggtgttgttaaaggctgcatgatggtattctgagcctctgctctgagctctgtcctagatataaagaatgtgcagccagctgtttgtctacttgtcctgaccctgttcaaggattaatgaagagatcctctatctgtagtccaatgtctattgggtagggaccagaaatgattgaacgtctttgcttcatgatacgctgtgccagtatacatgaaaatgggaacctaaaagtactttcataagcactttgtggaacttatttcttcctttaaaatgtcctagacaccttattgtcacctcttggctccctctggtttctgtattttcactggtacattggatcaccatggcagagccctaccctgcacccaacccaatagcaggaaggtttaccttcagcttgttccctgtatgctcagtttccggtggatttattactgtttttggttgtccccagaggctggcttatcatgaagttaaggatcttgatgcctcagggcttttcacttacatagaaccttccaagcccatgggtcttgaatctttgctaaatcggtccttgctctgtatggtactgctttaactgaaacacacacaggaagctgtgtccttactttgcacagatgtattattcaacactgtgaatactgtagtaataatttttggtattttccttgtaaaacaaagagaaaagaaaacaaaatacagaattgtgctgcttttattcactgagtagtgtttcaaatcaagctagctttctggcagtgtgacatcatggcttagcaaagagtccttagaattttctaacttttaacaaaatggggaccttaaacaatctattctctgaaaaataatgttgaggtttcacagtaggaatgaaaagggtgggacgattatgatataactaactcaatttttaatgaataatgaattgcagagttaatgcttgtcagaattttccaggaattagggagaaaatgaggaagaaaattttacaagtagagttaagaggaagaggtagatgaatgcacgatcctgcttttattttatgactattaggatagagatgtttgaaacctgctgagtagctggtggaaggggaaggcttcaaggataaatagtagatggccatgcttgtcccccgacacagggaacggcctgcgcaaacacacttggtttgaggatatctgatgagttcaaagtgctttaactactaagcaggtggaatggcaggatataggagtcgtggcggccactgtaaaactcggtggttcagatgtgggtgacatgatttgcaaatataattacaaagtgatacgaactgttaaattggacaagtttagatttaggtgacagtaggacttagaagagacatctctatatttcctatgctaagctggaggtaataggagaacaaactactttatccacccctgaaaatgagactgttttactgatggaaacatcatcgtcttgaccatgagaaaaatccaagctagaatcctggccctgtggtttactagccaagattctttgaggggcattaatatttctttatgtatacattgagactctgtgatgatacctaccgcttatgcttgctgtgagcatgaatgagccaagatgtactgaagagccatgttaaatacctgtagatagttaataaatagtatctttattgttatcaagtaaatggaaagaattcaaaagaagggagaaagagagaggaatagtaaaatgtcatgagagctggaggttatttgaaaaatacatgttaatcaattgacgttatcaatcaagtaatcacgagattaccacagatacccagcttggggacaggaccacagaagaataatttgtgctgcctctcttgacgataactactttggttgaaattctgtatccctcttactttgacaaatcagaatcaagcgtggttgaatcttaaagactttttttttttctgaactaactcttactagttggcacaatagttaaatgtgtaggaggaaaagaggatgacggagaatgcatattttggtttggagagaacaaaaactgccctaggataatgtttgaatacatggccaccaacaagcccaagcttttgtggaaaaacactaaaatggctaaagcctctcagcataactgctttgctaatttaagtgtttgctttgagagtatgtgaacaaccgaattttcttagttaaatttattaaaaatgactgtacaggatggaattggccaatcagacaaaaacagttcaaaattagacgacgtttttcatcacttcacacttttgcagtgtttgctacaatcaagacactgtgcttagatgctgaacgtgatgcaaaggagttaaagatgtagtccttaccattgatttattggaagcaatagcatattacaaatactttatcttgctctacaggtaggcccgatacaagaagtgttggctatgagtaataatttggaggttcttcaaaaaactaaaaatagagctaccgtatgatccagcaatctcactgctgggtataacccaaaagaaaataaatcagtatatcaaagaggtatctacgctctcatgcgtgttgcagcactgttgacagtagctaagatttgggatcaacctaagtgtccatcagcagttgaatggataaagaaaatgtggtgcttatatacaattgagtactctttagccataacacagaaggaggtcttgttatttgcaacaacatggatggaactggaggccattattttaagtgaaataaaccaggcacagaaagacaaatgtcacatgttcttacttatttgtggaatcttaaaatcaaaacaattgaactaatggacctagagagtagaaggatggttaccagaggctgggaagggtagtgggggctggtggttggggaggtaggggtggttaataggtacaaaaaggtagttagaaagaatgcataagacctactatttgatagcacagcagggagactatagtcaataataatttaattgtacattttaaaataacctgaagagtgcagttggattctttgtaacccacaggataaatgcttgaggggatggataccccattctccatgatgtgattatttcacattgcatgcctgtatcaaagcatcccatgtaccccgtgaatatatacacctactgtgtatccacaaaaaaagtgttggaagagtgttgtgggatttcacacaaggcactgcctgggtttgtgtcactgctctgctctcctataccactcttgtcacataagcaagagacacacagtctcatatggagtgacaaattcggaaatggaaattcttttacagttaattaattcaattcagagtgtctcctcatcatcatccagcatttcctgagggtacctgttttgtgtaatgtggtaagcatagtctcttctcttatattcttccaattaattactttttctagagtttaggcccttctgccggagggagatgcctgtgtggtcacaagaatatttttctccctgcctccactttgttttggtgaccttggccatgttagttggctttattaggcttccacttcacaatctgtcaactcgattaacacaggcctccctggaatacctggctgttttgtttaagatgaatctaggaatatgacttgtttcaaatccacatgtcatcttgaaatgagcttgtctgggtctttagggttgaaatatatcccaggcttcttggctgctgatgtatatttactattttaacttcagttatctttttagtctgaaggctgaatgacttcttacagtgatcaacacaaagattatccagtagtctttggttgaatttattgtcttgacttcaatactatctatcagcaatactttgcaaggtcaacttttaaccatttttgttgttctttgccaaacattgcataaaataaaatataacctttcttctaccatattgtaatactgttgtaaaaaattaaatgatttcctactattccagtttattctctgtcaacattcttttcatactaaaaaggttggttttagcttatagatgaaatgtttttctccaaacttatttatgataataacaacaaatacttttatagtgcttagtatattccaggcactattataaacattctaaacaccttctgccattaactcattgagtcctcacaataatcttatgggtactgctaattgtgcccatttcacagatgagaagattgagggcaaagaagttaagtattttgcttatggtcacaagtgattgggccaatgtttgaaccaatcacttgtctgaaattttgcctttaactatttcacattttgcctcactgttagattttagttctttgttctgaatttggaatgcgtataaccatacaagcaaacacaaatttttattttttaacttgtaatattatggctgacctagagcagtgacatttttagtccaagacctagatacagacaacaggagatcatgtgtaaagaaaatagaataaaggtccttttttcttatgcagggccagcccaagataaaattttgtaataggttgaagtatatctttggcatcttttcacctttctctccctctctcaatttttggcactcctcctttcactttcatctattttttgctccactttgattagcagtagcctgtctaatccctgagagtaacccatacatcagacagaaactccaagtacagtgatacgggaatcaatgtaccctacctctgaccctcaaatttctcctctcagattctagcctgagaaaatatactgaaatgcaaaggtttttgcataaagatgttaatcacagcgactttcttttcagtaataaaaatttgaaaactgcctaaatgtacaacattggaagaatggttaagtaaattgtgcattatacaatacaatgcagcattatgcagccattaaaaactatgtttatgaaaacttctccatgacagaggatagtacataagtttaaatgctaagaaaattcaagttgaaagtagtataatatcaactctagaaaaatacatataaaacaaggaaagaaaaagctccaaatattaaatgtatacagattggatataaagtgattatttatagtttattccgttttctaatgtattagttttacaatctagaaaaaataaatgatcagtttttataaaaaccttcattcacaataaattgcaattttttcttaatcctcctagatatattgtcattttcaaaaatgatacttgccaatcccagtgtctttaattagtaggattctaagcagcacaagaaaatatagaaaaagattgaagaagtgtagagggaatatattcaaagtatgtagtatgtaagctgaaatagagcaaccgcaattgaattctcagatcactaaacttttcttgctttacacaaattttatctttcttaattcaattttttctttttcttttgtgctttctatttaaaagttaatgttttgttttgcattatattttttttcctctctgtgttggaagcaaagacagtaatgggaaaaggggacaagaaacggggcaaggatacactgaaggtgatatatatgatatatatatatatatatatcttcatagatggtggaattataaatggattacatatatcagatagaattaagtgtttgcaaattaaggcttgtttatactcttttgcaagcaatattttaaaatctgtttgtttattttttttatttttggaagccaagccagcagttgtttaaaattcatgcctctgcataatatatgaagactacatagatgagttttctggagatttctccttgacacatttagtttctccacgttgcttgtagaaaggatgattccattctctcaataccaccttccaccaggagaagccattttctttcctgaaggtcaacctacagccacagtagaagaggaaaccagttactgtgattccaaatataatttcccaggaggtgaaattccctctcctaaacatgaattggttacaggaaaagaaaaaagaatgtaattcgtaagactgtggagccattttcctaatccaatttctcctgtcccctagatcgatatcatgtgaattgcttccacaggggactgtgctagcagagaggggtctgtggaaagaaagaagcaccgtgctccaatggaccattattattgtttccatatcacagggtccacatatgcatgtaaatgtttttatagtacacatacacaaatgcaaaactgaatgtctaactaatgtcaagcacggtcacatacacccacactctctaatttcctgtccaaggtggtgatctgtaaaagagaggtgaactgtaagagctgaatgattagaaaataaattctaaaactcaagtgcacttaacagtggacgtaatcagtagagagaactaagacctttaggattctgatgcatctgtcacctgtaagtaaactgacagttctgtttttttaattattattaagcatgagttgctatataaatcacatctcattacaacaagccacaagtgactatctacatttttatgcaaaatgaatgctatcctactaaatgagcattgcctaatattgggagtcttttcttggtcatgcagtgatatttgctgataggggatttgacctgtcatagctttcttctagttttgtagacatttcttgttctctacctccctggttcccagcgtgcttatataatttgacaatatcttttggagcaatttgaaaatatgaatctcaggtcattggaatttgtgtattctaataaaaactggcataataattcagaagtggaattcattgaagaattatgggctcccaaatgctagtcaaattattttttatagaggtggaaagaaagggtcattctgtttttatttcaatccccaaagtatagattaaggcagcagtattctaggtcttacacaatcataggaggtgggtaacattgcaggagaggaggaaataatattcgttgactgtttactattggcaagacatcttaccaacagtttaatactctttgcaactctgagccagttggctctctctgtatatcacttttggaaaagctgaaatttgtaaattagtcccaaactctaggtcagagggtaggggagtgaaggaaggtttcattaaataaatggcccttgggctagtaattaaagatgactatgagttacctgagtaacaaggggagggaacagtgttcttagtagagggaacaacatttgcaaagaatcttcagtgggatggagcttaaaaataaggcaaacatggctgaaggacagagagtgtgggagagtactatataagctaagagggaggatataggcaggagctagatcaggcagtgctttgatggccattttaaggaattttaagcaatgggaagcttgaatcaaagactgtaacatgagcagatgtgctttttcaatacattattatagttgtggtgtggagaactgactgtgtggacacagacagactttcacttcaatcatctggatgaaacagtggtagcttagatggatgtttgtggtagagatggagagagatagagagtttggggacgatgggcagaattaatagaattcattgatatgaagatgtgaggaggtgaggaagagaaagatgtttaaggtgacatagaactctgcatcatataataaaatggatgggggtgccgtttatggagatacggaatgctcaaagacctgagttttatgaatttgatcatttttctaaataagtgcttgattaggagcatggatcacctatttggttttgaacatgtatttgccattcctgtgactcatgtaaaagaaatgtgaaaaggcagttggatctggactctagaagagaaatctagattcacaaactcgggaatgagcattgatgagaggtggagaactacaacagttattagccacatccaggagaatgagcctacaaggagaaacagaataatccaatagttaggaggaaatcaggaagatgactgttttgtggaaggcaaggtaattgatgtttcaaaacaattttgttggtttttgataatgtggaagttatgggcaagagaatgcttgggatgctcaaagaccagcaagaagaacagagtgactggagctaagtgggcaagatgattagatttaaaggttgattttaggtgtgatgagaatgcattaagaggttttgagtgaagaggggatatgacctgctttacattgtcactggactacagtgatagacagtgaaggaagcagggatggaagggcttggggggagaccaattaggagactgtgcattcaacattcagctagtatttatttaacatccagtatatgccagatatctgtaatctaggcttgtcatttggacttggacaaggaagaagtaatcaaatttgagatatattttgaagtcacagccgttgggatttgccaatggattgaaaatcgggatgtgaggaggagatgaatcaaggataatttcatggttttttggcttgggcaatagagagaattgcagtggggctgagactggtagccatagacaaggaacagaggtgaatagggagaggagcacgagttcagttctggatttgataaggaaatggtaatttttgtttataagattcttatgaggataaatgaagtaatgtctgtaaaggactttataaagagcataaacacttatcataagattattgttgttactattattagagtgggccatagtgaaaaccagtattctgatttgttgggccacctactgtgttttattcttggctttgtcactaacttgctgtgtcactttgagcaatttattggttctttctcaatctcaatctcttcctctctgaaagtttccaaagtgaacattagagatggaattgactagaagatcaggaagatcccaatcagctgtaacacccctatgatataaggctgattagtattatctcagtattattttttacattattgatattgatattttacttttatacagaagccaccttccaaagtagatttatcatattctaatgagcattgtgaatgatctcatttcagagataaaaatgttgaagggctttaattatatttaaagaaaaacagcaaaaatgaactcttatgatgaaaatcagtcatcaaaaaaaaaacctgagagatgagaaactacaacaattatccaccctcccaacatgtatgcagctattttgaaagaaaacatttggtacctgttgttagattttggaaggttacacacaaacttggaaaactgtctaaagaaaagccaagggatttttgagttttaattacttcttttaaaaagtaaacagtagtcaattaaggagccataacttgtcttctattattaaattaatggaatcatgcagtaaaatatcagtggagactgcggcattcacctggacagacactgctgttttaattatctatagagtcaaatctatccaaacaatcactctcataatgtaagagaaggaaagaaaaactaaaaactagtccatctctaatttttctcatatatcagggtttttttaagtttacttgctcttcttgcctccctgactcaatttcatccctagattattgcagcaatatcagcaactattagttattattttagttcataactatttgttattctttggatctaagttactagtatctagagtggttctgaatgaccaggtatgagcagtgtggaggattggaaagcacatattctgaagaggtgttgaactgaaacacatccttctaggtacttagctgttttgtttctaacaacttaaagatgttaaagtatgttgttcacatctgcctcaatataagtggcagaagcaacattcctggtatgaaaatatgcacccagagaacttaaaatttccttgatcaatgttaacctgctgttgcagccaatgacatatcttttacctagagctagaaggtactaaggatgaaatcttgtgggattcccatgtaatatagtctgaatgtgtgtctctgcccaaatctcatgttgaattctaattcccaatgttggaggtggggccttgtggcaggtaactaaattatagggatgagtttctcatgaagagtttagtactatccccttggtactgtcctcatgatagcgagtgagttctcctgagatctagtctttaaaagcgtgtgatgcttcgcccctctctctcactcttgctttggccgtgtgacgtggctacaccctctttgccttccaccatgattgtaagtttcctgaggcctccccagaagctgagcagatgccagcatcatgcttcctctacagcctgcagaaccatgagtcaattaaatccccttccttcaaaaattaaccattctcgggtatttctttatagcaacgcaacaatgaatgaatacaccatgggatgctgctgatgtttggatatcctctcacttctaatccctggaaagaaaaccttgcattccagagcattccatctaagcagctggaaccactccttaggtaggatctcagtggcccctgtaacaagtactatgattatagtggacaagtacaactgctcctatctattcaaatggaagaatgaagggacaatgttatagttacaaaaagtgcaaaattttattgcaaaacttcctagtaatgattctaattatctttattgaatgtctgccattttctaggcactggagtgggggttgatttggtttcccttatctacctattcaggtagataagggaaatttacgtggaagctgaagttccttactagagagagcattatcacctctaactctgaacccagtgggcactgctagttttgtagttcctggagttgcactctgcctttttttcctcacacttataactacttctccagctcctgccctggacaggcctgcactgctctgggcattctgcccactaatgactagtttttggctcatttcctccagaggctgcacagggaagagtgacctgtgtggccttatctgtaccatagattttctttcttgtgtccagctgtaatcccaatttatataaacatgtctatacctgagaccccagtcttgataccccaacatataacgtcttgctaatcaccctcacatagccctttaagaaggtattttataattaagagacttgaaactgagaggcttacttgcccaaggtgcttgggaatgcattcagatccacactgtgtttactgtactgtgctgtctccatcccattgtacattactcatttgtaattccagctgcttttgtttgagtgactagcaagtgttcaagtttcactcacatgccatactcttagaggaagtaaataacgtgtttcttgaacctcactgtgttcaggaagtactttatttaaccttgcctgcgggttaatgaatccttgctctgcttcctagggctttatgtatgattaaccaatatacctgactatatatttgaaaagttggccaaatactatatctggggcatggggttccactgcactgcagcagcgcgtatttacttgctcccagggctgtccactgttatgagagagagagaattcctactctgcattctaccccatcaccaactgcaatgtgagaagcgaatcacaattattttctcagtccctgaagtatttgctccagaaggctttatttgatgctagaaaaagattttcccataggatcaagcttgtttatggtggttaagaagaccaagaggggaagaaaatctgttagggcaatgtcagcttaagagagaagctgaaattatttattttagcaccttatttctacatacccctctgtttgattagctagacatctaaatccatgcaaagcattgtttatataacacaatctgcaagatccttacagtcatagcatcttcatcctccctcccctatgtaggcttacacaattgagaggagacaactgaagtctcaattcacgtctcacatttcacacaaagaacatcagctttttgtatcatttactctttacaaacatactattgattgccataaaaaattatctctgataacacactcataacatcctatctgttatttacccatctctgtgaaactgattatgagatttttcccaggtgactagcaggaagcaggtctgttaagggcaaaggaggaaggggtacagcttgttttgtgctgaaagaagaccagagaagtcagtgaagtcaacctcctggacacagctttttcccaagctgaccctgttgactgaggaatgccgagttacattaatgatggacactgtctgcccatcatggaaagcggagagctacatgtgtgggaaagggtagtaaactcctcctccacaactgtgcctccttccaagcttagatgacagaatattagtgtctgttatccttacgacatctctccatctggtcctctcaggatttactttatggtctgttttatttcccttttactactattagaaacaaacagctgaaaggattaatcaaaaatgttactgcttcaaagagtaaaaaacatgttacctgtttgactggtgcccatatatagttaagagtttctgaaggaagaagggtcacgcttaatagatttgatgagtccattaagcctggcttccatcttgttgctttgtttgtgcatttatttccattttggtatcttagcagtcatcttcttttagcaaacattgaggtttcagtctattgggtcagggtattagcaatacattaaccaaaccgttgaagacaaggggccagacatattcaaagtgtgatccgcattcaatatcaccattctcttgcaattgcaaagttataggcatcctttggatttttgcagcacttattttataagaaaaggagtaaataaagccacatctctgggatatgctttgagatgtttaagattgggaacattttcaggctgtctcaatactggaaatttgttgtccttttttttcacacattttctccctcttatactactctttaccaaaaggtgggtaaagataaggagatgaaaaaaatgttgcttaagtttttggttgccagctctgttttaagcctgacatagaagggggttgaaatttattttcatcattcagttaagagctattcttggctttcacaaatctcagtcctaattctgttattgtttcagataatgtagaatttgtcacattggctaaaaaaacaactccactaaatcaggacattagttttacatttcactgtgctacattctaaaataaaatgaccatttgtgctggggatgattttagaaaagcgaataagtaatataaagttttcctggttttctcatgggcagcctagaaaaatgccacaccaagactcaagaaattacattctgaattttgcatgaagataagacttgaagaaatcttatttcaacttatactttcctcagtttatgtcctgtaggaggaccctgtagagggggaatgcagaagaccagagggaagaaaatagatggtgtcaattgttatcaacacacgatagtatcacatttttattgagatataatttatatataataaaatatgagagttaaagtattaagttcaataaattttgacaggtgtatatacttgtgaacaaaacttcattaagatacagatgaattctgtcattctagaaatttctttatgcaccttcccatcctttcagaaaattcctcatgcccctcactcctccttctcctctatcactcatagaggcaaccactgatttctgtcactatagtttagtgttagctgttctcgaacttcatataaatggaaacatacagtgggtactctgttgtgcctggatttatttatttatttatttattacacctttaagttgtgggatacatgtgcagaacgtgcaggtttgttacataggtatacacgtgccatggtggtttgctacacccatcaacctgtcaactacattaggtgtttctcctaatgttatccttcccctagactcccaccccacaaaaggccccggtgtgtgatgttccccgctctgtgtccatgtgttctcattgttcaactcccacttatgagtgagaatgtgcagtgtttggttttctgttcctgtgttagtttgctgagaatgatgcaatcccattactgggtatatacccaaaggattataaatcattctcctataaagacacatgcacatgtatgtctactgcagcactcttcacgatagcaaagacttggaaccaactcaaatgcccatcaatgatacactgaataaagaaactgtggcacatacacaccatggaatactgtgcagccataaaaaaggatgagttcatgtccttttcaaggacatggatgaagtgcctggattatttagcttggtgtaatggttttgagatttatctgggttgttacatgtactagtagtttatatcttccattgtgtgagtatgccacacaatggatatttgggttgtttccagtttgggaatattatgaaggtgccatgaacattcatgtacaattttttatgccaattggctttaatgtctcttgagtgagtacttagaaatgggacggctagagcataagctaggtgcatatttagatttatgagaagtggttagttttccaaattggttataccattcttcactacctgttacccactgaatgacatactctgtgttctagccaatgctttaatgtcatttacctttttaatatgttaaagggtgtgtagtagtaactcactgtggttttaaatggcatttctctgatgaataatgatgttggataacttttcttctgcttattggctacttacacatcttcctttgtaaaatatctatgtcttttcactcattttaaaagtgaatttgtcttcttatagatttcatacatgttccttacgtattgtggatatgattctaatatgggaattgtgaatattctctcccagaatgtagcttgccttttcaatttcttaaaggatgtcttttgaagagaataattttaaaatattgataaaccctattttatcagtgttttctgttatcattagttttagcatactgtctaagaactatttgcctatcaagtttatgatataatctctttttttttcttctaggatcttcagacttttagcttatacatttatggcttatataatccatctcaagtaaatcttcatgtatagtataaggtcaagattaatttccttttcatatacatatccacttattctagtacattcatcaaaaagatgtttctctccacatttaattgcactggtgccttttacaaaagccataagtcacttatataagtgtgagtttattgatggactccatattttgttgtctatttgtctactgtatgccagtaccatactcttagttaaattttaaagttagttagcatacgttctctaactttgtttttctcttttaagatgttttagcaatttgaaatcctttaaaactacatatgaattttaacatcagcttatcaatttcttaaaaagctggctcagagtttgattggtattgctttgagtctataggttaatttagggagaattaatatgtttacaacatttagttttgcaacccgtgagtctattatctctctcaatttatttagatcatcactaatttatctcaccaatgttttgtagtttcagtgaagatagcctaagtcttttattaaatgtattcacaagcgttttctagtctttgatattgtaaattgtatagaattttaaatttaactttcaacttgtttttaatggttagtagcagttacttcctcctctgatatcctgaacccctcaaagttacccatgcggattggaatcaactttgtccaaactcttgtaaatgttaatattttgatttaaagtgaaagttgtcctgaatggtaacgcctaggttttcttctagggtttttatggttttaggtctaaggtttaagtctttaatccatcttgaattaatttttgtataaggtgtaaggaagggatccagtttcagctttctacatatggctagccagttttcccagcaccatttgttaaatagggaatcctttccccattgcttgtttttctcaggtttgtcgaagatcagatagttgtagatatgctaccattcaggacataggcatgggcaaggacttcatgtctaaaacatcaaaagcaatggcaacaaaagccaaaattgacaaatgggatctaattaaactaaagagcttctgcacagcaaaagaaactatcatcagaatgaacaggcaacctacaaaatgggagaaaattttcgcaacctactcatctgacaaagggctaatatccagaatctacaatgaactcaaacaaatttacaagaaaaaaacaaacaaccccatcaaaaagtgggcaaaggatatgaacaggcacttctcaaaagaagacatttatgcagccaaaagacgcatgaaaaaatgctcatcatcactggccatcagagaaatgcaaatcaaaaccacaatgagataccatctcacaccagttagaatggcaatcattaaaaagtcaggaaagaacaggtgctggagaggatgtggagaaataggaacacttttacactgttggtgggactgtaaactagttcaaccattgtggaagtcactgtggcgattcctcagggatctagaactagaaataccatttgacccagccatcccattactgggtatatacccaaaggactgtaaatcatgctgctataaagacacatgcacacgtatgtttattgcggcactattcacaatagcaaagacttggaaccaacccaaatgtccaacagtgatagaccggattaagaaaatgtggcagatatacaccatggaatactatgcagccataaaaaatgatgagttcatgtcctttgtagggacatggatgaaattggaaatcattattctcagtaaactatcccaaggacaaaaaaccaaacacctcttgttctcactcatagatgggaattgaacaatgagaacacatggacacaggaaggggaacatcacactctggggactgttgtggggtgaggggagtggggagggatagcattaggagatatacctaatgctaaatgacgagttaatgggtgcagcacaccaacatggcacatgtatacatacgtaactaacctgcacattgtgcacatgtaccctaaaacttaaagtataataataaaaaataaataaataaaaataaaaataaagtgaaagttgtgtgactcttcctttcacttgaaaacttagaggttcctggagggttattaattgttttaatttcactattgttttgtctcagggaatagggaggccagaggagagggagtgagataaggaacagacagtttgtggagcagttagaacacacataacatttgttaagttgaccatcttgcgtgggagtgatttgtggtgccccaaagccattatggtagtaacatgaaagatcattgatcgcagattaccataacaaatataatgataaaaataatgtttgaaatattgttagaattgccaaaatgtgacacggagagatgaaggaagcacatgctgttggaaaaatgatgctgatagacttgctgaatgcagggttgccacaaagatttaataggtaaaaaatacagtatctttcaagtacaataaaatgaggtagcttctatgtccttgtatgtttcatgggactttctatgtgcaccattatgtcttctgtgaataaaggcagtttaacgtctttgacaatttttttgtatagcattgaaaaagtttattttgagttaaaaatgtgtccttgtaaatttcttttctttttttaaaaatttcttctaaaaaaacagggtacatgtgcagaacatgcaagttggttacataggtatacatgtgacatggtggtttgctgcacctattgaccagtcctctaagttcccttccctcaacaggccctgatgtgtgtcattcccctctctgtgtccatgtattctcattgttcaactcccacttacgtgtgagaacatgtggtgtctggttttctgttcctgttttagtttgctgaggatgatagcttccagcttcatccatgtacctgcagaagacattatctcattcctttttatggctgcaaagtattccatggtgtatgtgtgtcacatttcctttatccagtctgtcactgatgggcatatggactggttccatgtctttgctattgtaaatagtgctgcaataaacatatgtgtgcatgtgtctttatagtagaatgatttatatgcctatgtatatatacccagtaatgggattgctgagtcaaatggtatttctggttctagatcctagttatgccttaaacttttattttctgtctaattgctctagctagggcctctagttacaatgctggatagcagtgatgaggtcagataatatagtaattattaaaacttcccatataaagaattcttgatccagatagcttcattaattctctaaatatttaagaaaaaaagatactaatcttatgcaatttatttaagaaaataatggagaaaagaacacttcccagcttgttttatgaggctagcattacttgacatgaaaacctgacaaggacattattagaaaagaaatcatggaccaataatgttatgagcatagacataaaaattcgtaataaaacattagaaaattaaacccagtgatatgcataaagacaaatttaccagggaatgcaaggttagtttcatatttgaaaatcagtagtgcaagtcatcatatttaacagaataaaggagaaaaatcatataatcatctcaatagatgctgaaaagcgtttgaaaaaaaggtaactcctgttcatgattaaatctctcagcaaacttggaatagaagagatatttctcatttgataaaggaaatctataataaacctacagcaaacaacacatataatgatgaaacattaaaacatttctctgtggaatttgatcttacttgcttatactttcattaaatgcatatatgacattttgtaaaatctcagttgctattattgtattattatgacctacatttagttagatgaaaaacacttttctggtacccaacaatttgtcattgccgtttagataccatttaacagtttttctgttgcatctacaagctgggtccacaccagattgggagcacactccaaagcaggacttctctgtttagcttccccctttccatgtttaaaaactttcaactgtcagaaaaatacagggaaaaatgttgtatcatgaaaccaagtaatggttcttctattaactcaaatactaaagtatgactatttgattagggatgctagatgtgagaatggaaataaagggatacaagaggcatttaaaaatagatagttggccggacacagtggctcacgcctgtgatcccagcaccttgggaggccgaggcgggcagatcacgaggtcaggagatcgagaccatcctggctaacacggtgaaaccccgtctctactaaaaatacaaaaaattagcctggcatggtggcgggtggctgtagtcccagctacttgggaggctgaggcaggagaatggcgtgaacctgggaggcagagcttgcagtgagccaagatcgcgccaccacactccagcctgggtgacagagcaagagcttgcagtgagccaagatcgcgccaccacactccagcctgggtgacagagcaagactccatctcaaaaaaaaaaaaaaaaaagatagttctggaattctgagtgtacacagaagataaaggatggagataggatgaataaagaataggagattttgtacatgttattttcttttctgagattagtcttgcctcttgtctttgactagtcaattcctcctcatcttgtttttaatcaacttttttgagataatggtagattgacatgcagttgcaagaaataatacagagagatactctgtatcttttactcagtttgccccaacggtgatatcttgcaaaactataatacaatatcacaatcagaatattgacattgatacagtcatgataaatagcattttcatcactacaagaatccttcattttgtgcttttacagccatgatgacttccctcctgaccccattccctgcttagcccctggcaactactattcctataattatgtgatttcaagattgttatataaatgaaatgatgtagtataatatgtattgaaggtagatagagtgattcctcccacttcataattaattttttcaaatatatttagcaattctaatttttctcctcatatgaattttagaataatctatatatacaaaatattttgctgagatattttataggaattttgttaaacttgtaatgtcaattatgggagaatttacatgttttttatgtagtatcttcgaatccatgaacacaatatgtatcctcatttacttacatcttctttgatttttttttattatactttaagttttagggtacatgtgcacattgtgcaggttagttacatatgtatacatgtgccatgctggtgcactgcacccactaactcgtcatctagcattaggtatatctcccaatgctatccctcccccctccccccaccccacaasggtccccagagtgtgatattccccttcctgtgtccatgtgatctcattgttcaattcccacctatgagtgagaatatgcggtgtttgatcttctttgatttatttcatcagtgttttatagttttcagtatacaagttagaactattgttatatttattatacctaaatatttttattttttgagtgattataagtgttactgttttcaattttggtgttcacatatatattgctagtatatagaaacacaatttattttgtatgtttatcttgtatcttgcaaccttactgaactcacttattagttctatgcactttttttatagattctttgggcttttctaaacagaaaaacctgtcatctggaagtagggactgttttctttctttctttgcagtcagtctaccatttatttcgttttcttgtcttcttggactggctagaacttccagtactatattgaataaargcagtgagagcagaaatgcttgccttgtttctgagaatagtgaggaagcattcagtcttttatcatcatgtgtaatgttagctgtasgttttttgtagatactcttcatcaaactgaagttctcctctatgcctgtgtttctgagagtttttatcaggggtaagtattgaattttggcaaatactttttctatatcctgtgtagttttccaaacttggaaactcttctgcactctagctgccttcacatgggcaagtgttttcatatcattctgtgttcctctgtatgctttgccagaaaggagttcaccttaaattttaagacaatgttgtggatagagaaaagaaaaactttctgtgtcatggaaaagaggtcagaatttgggccaagattttactcctggctcttttatcaggccaggattttactcctggctccttctatcctttgcatagtgagatcatattctctttgagtctgtttcttcatttacaaatagaagaaaaatagctgcagtgatgatcaggtgacttgatagaggaaatgcttagtcaatgtaattggtttatagatagtaattaatgtgagagttttccccagatttttatagwcttcctttatcatttattgctttaccacaataagtcatttgtcaaggaggaacacgtatatttccctagagaacacaccgatwtgagaacatacgaagcctacactcctcattcaggaacaggcaagagacaagtgtacatctagttccaccaagaaaacacacacacacattaacataccagtaatagtaagaaagcttttatggagattctgaaacatctattagaccttgaaagataacttagtatttacatgggaggagacacacttcaacctaccacgttaaaaaagatcccctgagttgtatcctgagctgtcgtagataagtgtcttcacccctctgttactagcctgtgttcagtctagtaaaaagcctgcaatgagaaaggaacaatgacttctttggaaagagaaaagtgtatatgttttggggtgggattaagagaaacagagaaaccaaatgttcctatgggaagctggaacttactcagcattcacttgagaggaaggacaacaagcccctgtgcaaacccctaggaaatgtcagtagagtcaatttctgaaaaatagataaacagcttggtaaagtaagctaaagaataatagtgatacatcccagattttccaggatatttctgattgaaattgtccaattcatttttggtgatgttttaatttttgatttgggaaacacgaacactatacttctatgtttagctttagtgatttttctgccacaagcaatactctagactttagttgagtttttccctcttaattaaataattcttatttgaatatatttatgtttattttaaaaaaggctactgagtacgagattaccacttgttacgatcttgctccttggagcagaacgtgacatctcatatgtatatatacttagctctcttgggcaaaagcttctccctttgttccacatggtcatctgaacattccgtgaagcatttctatcctcccaggatgttttatttcttgttttcatgggtgaagagagactgttttataaaagttttcaaatacttactggatttgtatcctaaagggagaaagcagcaggtcattttttttttctttcaagggcttgctgtaagttggtcttcctcttaacacgaagaaaagaatgacattcttcatgaccgccattgtgagtaggctgtattacattaaagccccattattagcaggctgtgccttggctgattttatagagagctcaggaacagaagtgtagaacaaaaacactgatatttttcactggcacaaactgcagatactttacttgttgattaatttgttaaaatgtgtggcagaacatttagttatcaggtagtcattctgagtaaactagagtcctatgctcctttaacaatggaaaaattatattttcctttttctaatatcccagtgttgtatgtatgctcatttatgttcttggtttaacaggaacattgaacattccctcactttgaatctactctaactcctgtgtttgtgtattttcaccacagtaagccataatatataaaatagtacaattaagaaaaccttagccagcacggtggctcttgcctataatcccagtactttgggaggctgaggcaggtggatcacttgaggtcaggagttccagaccagctttcccaacatgcggaaaccccgtctctactaaaaatacaaaaatgagctgggcgtggtggcagttacctgtaatcccagctactcaggaggctaaggctggagaattgattgaacctggaggcggaggttgcagtgagccgagattgtgccattgtgccattacactccagcctgggtgacaagagcaaaactctttctcaaaaaaaaaaaaaaaaaaacttaagtaatcttcataagtaaatgatatatacttaaatacaaattatcacatttataaaagaaattttctgtatttgtccaacatcggtcaaattccttaatcttataacaattgacacaagaacaagaactgccacccagtccacatttatcttctctatcatatttaagatattgcagggctggagtatcttcttaggatatactttcatcacaacagataacctattacatcagagattcaaagaagtagaatgggagagagaaggagttatattttttttaccctaaatgatgtcatcaagtcactatgctaatggagattgctgcacttgagattatgtgccttacaaaataatttaataatgactttagacagctgatatttcccatatagaaaataagaattcagcttatttatattctggaaagaaccatatctgctgcttagagtgaagcagacctgcagtttacacaacagttgagaataatcttgtttaccaagctctttggataaatagaaaaatatccaccttatcttgagttgctgtggtaatcagctgaattagtttactacttaagctctctggaagatgattggtgcatcatctgtgaagatgactggaatgttagcccactgaagttataacttgtggaacactgttcaaattaccgaaaagagtaaatcaactatctgctggtactcagttctcagggagcagtttacaccttgaaaaatcagatccaacacatactaaccatagtttctcatgttatgatttctggtggaattcctttagactcagccttattcttcaagatactgaatttttgggaaccctaagtacagtttctccttcttacatagagacttgatgttcctaactggtcgcaaacttgggttcatcagaagaatctgctccccttgtgagcacaaataatatctcagtgaagagaaagacactgtcatagaagagtcaacatttatggaatttcctggaatccacagttatcttaaactctgttccactttctctggacaccagctaccttcaatagtgccaggttcagtgtctaaccatggagtatctcatagttggactgggtgagtgcagatgcagttgcatgagattttgaaacatcacattataaaaaaaaattttcaggtatgcaaaaggcaggagagaacatgtactccttaccctgctttaaaaatttctcaacattttgccaattttgtgtcatctattccccccaatcataacattttttgctgaaatattgtaaagcaaatccaaaacattatttcattttacctataaatacttcaataatttacatgggtttttaatggcttgctatttattttcagggtttcttttagtatctttgacctctgtcacagctcatcttgcaaggttgcctatctcattgtcagagagctctagctaaagctcattcatcgttttgtgaactatgaggccacatattctgtgttgacccaagttgggccagaaagacagttttcaagagggcatggcttctaggtctctgccgcagcttgtccactttctttcattgtcagctactagaactatggcagcccatgctgggatataatttttcattgggcacagaaaaagagggtggcgttaggcagaatcaaaagtaggagctaagaaaatgaaaaagacaaggcagaaaatatgccaaaggtgcatatttaagggataaggggaggaatctgtgatgttgaggatgagtccccttgaagtaggggtgcacacaagagtctcccaacttgtgaattactaaggacaccaatggtgaactaatttataatagttgtctcctgtgactgagaaggctgagagtggggattatcagtaagaaaatagctcagaggcaaccaagttgtatggatctttagaaagggaagcaaggaaatagacaaaggacaacttcactgaaaacatttatgaagtattcagtaatgttttaacttctttttaatgagaaacagcaaaccctaaggggaaacactctggggtgtttatgtccagggtcagcaaggctccagggttatgtcttattcagacatattcaggagtaccggggagagagaatactccaggaaataggtgttggcatctgtggaaaggagagaaagtcagactgtatcctagagtcttagggataaatatagagtggaaaacatgaaatcatcttgtgaacacagggcagctattgaggcttggcaggtaggttggggttattgtgaaaaagttcccagcaatccaaagagatgttttatctttgacattgtgccgcctgtgccttgagttagaaaggtacacacacgtgtgagttaagaaaaacttctgatactaaattatttatagttaaacctctagtaaaaccctgaattcaaaaatatttgtagcagaatacaaatattctttttgttttgtcatttatcctggtaaaagtcaagttgctgcagcgtgatggttctggtactgaaatggtcttaggaaagtggaggaggagtggagttacatgtttttaaaaacttgttttgtggctgcatagtattccatggtgtaggatgaagctggaaaccatcattctcagcaaactatcgcaaggacaaaaaaccaaacaccgcatgttctcactcataggtgggaattgaacaatgagaacacttggacacaggaaggggaacatcacacaccggggcctgttgtggggtgggggtaggggggagggatagcattaggagatatacctaatgtaaatgacgagttaatgggtgcagcacaccaacatggtgcatgtatacatatgtaacaaacctacacgttgtgcacatgtaccctagaacttaaagtataataaacatatatatatatatatatatatatatacatatataaacttgttttgtgaattttgaaatagttttacacatacataggcattgcgataatgctacggacagttcccacagtccctgttacctagtgtccatcatggaaagcatataacgtaatcatagcacaattatcaaaaccaggaaatcaacattggtaaatgctattaactaaaccatagatcttttccagatttcagtagttcttacatgcaatcattttcctttatagcatatggttcactgaaactttatcacatgtatagatttgtgtaaccaccactacaatcagaatggagatctcttcaatcatcccaaaggaactctttggtgcagtccctttgtaatcttgtcctttccccaacctaatgcctggcagccactaatctccatcattaaaaatttgtcatttcaagaatgttatatgaatagaataataactatgcaaccttttgagattgactttttttcccattcagcgtaacacctgagatttatctaagttgtgtgtttcagttgctgagtaagattctattttatggatgtaacacagattgtgtatccattcatgtgtgttgaagggcatttgggtttttttcccccaatttggggctattactgaaattatattttactgttttttcctaaatatatgaatctgaaagtgtatctgtatcatttaagacttaactccatgtggaattaatttctagaagcgtgaagaacaggttaccagttctcccaggattgctatgatgactaatttttagctgaataaaatatgaatatatctattcatttttatatgtgtcaagaatgtgctgagagttataggaaaacagaaaggtaataattgttaccaaatcatgaggagtgcccaagttctaaaaaacccacaaagtcaaagaatggtgcatggctatagtttcagaattattttctcagagagtgccagagccaatcttcttggtacctgagggtaaacacccaacctcttgttcctcacttagactttcttctatacttggcttttctccatgaagggtactgtttcagcacattggacagaaaaatacaagcacagtgcaaaaataggtgtgaatgttgtactgattcaggtaccagtatgtgttttgaaagttaactctgcttttctagtgatacttactttggataaaacctaggtcaagcctgttcaaaactgttacccgaaggcaattattcaacattataagcacatggtttccagatcattcatcattttatttaacttcttgagtacataaagtttttatcccatttgtgagtcttgatgcacacaattgactaactgtgtttgggttattttctcttccacattgggaaaaactatctttcatgatctatctcccttttcaaagctgttaaacttttgtcttctttaaatgattttctgtgatgatccagtgtttcttgtcacgtttctgtacctatatgtgctactgttgtgtatttgtttgttcatcctgcctctcccacggaaagacctgtcttctgttcttcgtcaccaagactctctacacagtaagggctccatctgttttgactgttgacctactgaagggacatgcctttgcggacagattcaacacaaggttgaggattaaacccaggcttattttccttcggattttctcaacaatccttccatctcctagtagtatctattctcttctagcaactttttttttaaataataaaattgccttggtcttctaggaccctctgggaaggtaggtgtcaggatggaaagtaggttggtctgatcaagggagtcctgtcatgggaggtgagaagacctgggatctggtactggatttgcttctcactcctaacatgatcatgaaaatattttctgcttccttccttattagcaaaatcaggtagatataaaaggctctgaagcagactgggttgttgtaatggcaaagggggaacytaaaaaattctggactgagatgtgggagtcacaccattgtccactgcagacataccaaacaagccaccttaatttagagcacaggcttgtgagtctagtgatgctgttcaatcatacattttaatctctataaaatgtaatctcctatgcacaaaggtagtaccaatagcacttgagtgcctcgaagagagttttgcccaaaaagcagcagacttactgtatgatatgtccatctgtgaaggtcctggctcagactgagctgacagtatggaagtctactctaatgcagaaaggttggaaacctgtaattattgttaaaagtttagggttgtggaacctatttttatagcaagacaaacttgctctggtattggcccatggatgggtaaaagaaagtaaatgctttcaccttttaaaaaggggaaagtgtggcactgtcagcatggctcagtgctcactgtcatcctgctgctacatcatgtgcttgatgcactgtcatttgggtgataacatcacatttaagtcatgatcatttattcccagtgtcagagtgaaggagtcctgttcatttgagtttcagtattcctcaaactggatttcaaaaagaatttcttccaaaagaattcatcaaggactaccgtaatttcataccaggaagaaaactgtcaaaatatgtcatgagtccaactaaaaacctagctcaaaccatcatagtctctcatccaaactactaaattgacttcctaactaggttcctgcattgactcttgctcctccatagtcggtgctccacacaacagccagagggatcttttaaaattaaaattctgttgaaaatataatacccatcacaaagcctttggcagttttctcttagaagtgcatgcttttacttagcttcaagcaatagtatcttctacctgtaggtcttctctctccatatataagtccttcctatcttttcaaatccagattttacattcgaatatccttcaggagatgtttaatgatccccccagctgataaaagttaccttctctgagttttttatgacacagtatttgtatattttatgccatgtatcagttttctaccttgtatcatagtaatttacgtaccttcatcctttctctactttgaatttattgaggacagattctgtgttttacaaatctgcattgggtactcaataaatatttgtgaaataactaaataaatgagctgtgttaaaattaaaaaaaaaaagaaaaagaagtgcatgcaataaaaatggcttgctatggctcacaggaaccaagtgtgatctggcctgagtcagtcttttcaacttcccctcctgccactctcccctttgctggctttcctccaagtacactggggtttttacttttctttggatcttcctcagggcctttgcacttgtggttgcctctactgggcacttcatattcccccagatttttgcctgactcccctacttcatttatgatcaacatgtaatcactccctcattctttccttattctctatcccttaccatgctttatttttcttcatgacccttatatatcttagatcataatatatatttatttgttggcttatttcctgccttcctgtctagagtgtaaccttcttgagagcagtgacattgtctttttcatactgcatcccatgcctgtagtgtctggcacagaacaggtttttgattaatagtctttgaatgggtgaaagagaatagaggtatctggcatagtcgggggtcaagtcagcctgaggtcaaatccaaatcttgtagattcgggatattaatcatttgttagatacatagtttgcaaatattttctccaattctgtaggttgtctcctcactctattgattatttctgttgctttgcagaagctttttatttaaattaagtcccagttgtctgcaaggaacttagacaagaacaacaacaaaaaacaatcccattaaaagggggctttaaagtacacgaacagacatttctcaaaagaagatatgcaagttgtcaacaaacatgaaaaaatgcacaccatcagtaatcagagacatgcaaattaaaaccacaatgcaataccattttataccagtcagaatagttattattaaaaagtcacacacacaaaaaaacccaacagatgttgatgaggatgcagaaaaaacagaaccattatacattgttggtgggaaggtaaattagtacaacccctatggaaaacagtgtggagatttctcaaagagccaaaaatagaactactattcaatccagtaatcccaccaccagatatctacacaaaagaaaacaaatcattttattaaaaaagagatacctgtactcatatatttatcacagtactattcacaatagcaaagtcatggcatcagcacctaagtgtccatcatggaggactggataaggaaagtgtggcatatataccacagaatacaactcaaccgcaaaacagaatgaaatcatgtcttttgcatcaacaggtatgaacctggaggccattatcctaagtgaaagaactcagaaacagaaagtcaagtatcacgttctcacttatgagtgagagataaacaatgggtgtacatagacaagatggaaataatgcactctgaggaccccaaaagcacagaggatgggaggggtttgaggtttgaaaaattacatagtatgtacagtgttcgctattcaggcaatggtcacactaaaagcccagactcaccactacacagtatatcaatggaacaaaactgtacttgtacctcttaaatatattttaaaaatccatactttggccgggtgcggtggctcacgcctgtaatcccagcacggaggccaaggcaggcggatcatgatgtcaggagatcgacaccatcctggctaacatggtgaaaccccgtctctactaaaaatacaaaaaattagctgggcatgatggtgggtgcctgtagtcccagctactcgggaggctgaggcaggagaatggtgtgaacccaggaggtggagcttgcagtgagccgagatcatgccaccacactccagcctgggcgacagagcaagactccgtctcaaaaaaaaaaaaaaaaaaaaaaaaaaaattcatactttactagtgggcgattattggaatatgaagcatttcagtttaactttgtaagctttagtctttgtgttttaaaatgtgtctgatgctgtcttcttcatagtttgttaggagcactaaatgaatagtagaaagcctgccagaaagtgatttagtctgaatctataaagctgtttctgagcactgactgtaaagtgcactagaagctcaaatttttaggttttgtcattttgtgacaggttgatgtggaactcgaggggttggccaaagccctcagagggttgtaggccatgaaagttcgagaaccactgggccatgtccatgcaaaatgaaaaatagttaaattgaaaaacagatgtccttgtgcctcctaattcccagcaggggctcttgtctgaagcctgagatggctccttgggtttctgtgaatgttgtcaagggcgccaaggatgccggacttgcatttagatgcccaagcctctgtgctggaaatgatgggaaaaaataggaactcttgaacttgagcaagtattagaatatgtgaggtaatggagaagcctcctccctcatgcccatgctcttgtcaggcctgtttgttaaggtccaggccccacttcccactttttttatattattattatactttaagttttagggtacatgtgcacaacgagcaggtttgttacatatgtatacatgtgccatgttggtgtgctgcacccgttaacttgtcatttagcattaggtatatctcctaatgctattcctccccctccccctaccccacaacagtccctggtgtgtgatgttccccttcctgtgtccatgtgctctcattgttcaattcccacctatgagtgggaacatgcggtgtttggttttttgtccttgcgatagtttgctgagaatgatggtttccagcttcatccatgtccctacaaaggacatgaactcatcattttttatggctgcatagtaacagcaggttctggagaggatgtggagaaataggaacacttttacactgttggtggggctgtaaactagttcaaccattgtggaagtcggtgtggcaattcytcagggatctagaactagaaatacacgtatgtttattgtggcactattcacaatagcgaagacttggaacccacttcccacttttgtttcctttaattgcccttatgagaccacatccaaaatcccaagtcctgccaagtgaatgcagtacttaaagatttgactactggatgtctggtcttggagaaaacagtcaagagctggagcaagacagagagcagcatacctgtaatacagcttattaaaataatgcaaacacttctgtaatatgtatgaggtgccaggtagtctgccaagaacttttcatctattaatttgtttagtctttacaactgttcactccacttcctgttagggagatagctgttgttggacccaatgtagagatgaggaaacactgaggaccagagagtaggcatccaaggtcacagagttgggcatgcgtggggcagagccccaggctcaggcattctggatcccaggcccatgtgcctgcatggtagagggggagctggcactagcccttgtgcccccaaatatcctggctgcattgttcccctgttcttagttcatttgtgttactataaaggaatacctgaagctgggtaatttataaagaaaagaggtttatttggcttggaggtctgcaggctatacaagaagcgtggcgccacatcatctgcttctgatgagggccttaggaagcttccacccatggcagaaggaaaaaggaacagatattacatggtgaaacaggaaggaagacagagcgggggagatgccaggctctttttaacagccaggttggcagggggtgtgtggggagactcttgtgggaactaatagagtgaaaactcagtcattaccttgaggatagcaccaagccattcatgagggatccacccctatgacccagatacattccaccaggccccacctctaacattggagattaaatttcaacataaggtatggaggggacaaatatccaaactctattatccccataaatggttaaactccgggagagacaactatgcacctctcaatcccaaggtgagttgggattcacgattggttaaaacttcatcagaaccatccacattggaaatcacatctaaaacttgagtaattttatggtttacaaagcatattgacttccttgatttattcatgttgccagctgccctccgaggcagaggatcttttcacttttctcctattactcaatgccactactgagcctctgcactgaccctacggcttcctgtcgtactctctgcaatgctacatgtcccttctagtctagggcgatcctggtggaagcatgaagccagccagcctctctctggtcaccaccatcacttcattccttatatataccaggcatgggaatgtttcttttgcttgttaatttttgttcttgctcttatctgcatttatcttccttcccccaagtgtactgccagaccctggagaacagggaggggaattgtttttcctttattattctttcctcagttcctgctgtagaactgtacatctagtcaatgcttaataaatgctggtaagttgaattatcaacactgaacgtagaaatgcactgttgcctggcttgttagttttgtaagaatagggataataatagtagcaactaatgtgtacagatttgactatgtgacattatttaagggctttgcacacattaatccatttaatcctctccatgacctaaagcactgctatgctgaagtgcattttgcctatggagaaatgactggtttttgggaagccaatgtgcagaaggccttgtttcactacccctaaaacagtgcatgtgcaggaggactgttattgctgtgctttggaaggtctgtggatgaggaaatgtagaattgcagatttatgggttggaagttgatttagaagacacatgtaacagaagtaacaatcttatcagacttaccagtgtcttccacttatttccttwacttcagatgctcaggaacgacagcacytgcagaatgcatccactgctgaaaaatgagagctgtttcttgttggtactcttcagggacattttagcatagtggtggactccagtgttgacttttcttttcatcatctgtttgatcttggtggattcttaagaatctctggacctgagtttgttcatctgttgattggggttcatggtagccacttctcaaggttatgattgaggtgaaatgagatgctatgtgtgcaaaggacctggtagcaagaatgacatgggaaggagggcttgctcaataaacattgcctgttatagtgtgctggcattaccttaaaatccttaataagctgtaagttttggatgagagtcagaagtgttgggttggtgaagcattttgctacagattgcaggcttttctccggtgtcacaaggcattgaaaacgcttgttcggagacagcccagaagggaaaaaaaaaaaaaattctggaaagcctggcattttgtgctatgttgtgagtaagacatttatagttattgagccaaaatttccactgtaatagaaaaagcagttgcttttaaacttctggtccaatttagtaattatgggtgagttaaaatgtaggccatttgaattggatttggaggatcaagtaagattctgtcctacagtggggatgactcatagaggaggtagcttgacatagtggaaatagaagctgataaggagccaggagacccaagttcctgtcctggatttgcacaaataaactgtaatagcctttaggcaaattattaaacatctcagttttctattatataaaatgagagggctgtgtttgtgaatggatctttcaacatgcttaaggttataccaaacagatcactgaaaatgaaatatgttatctacagtcattagggaataaagtattcttgctagtgcaatatacttatttggagaggattacaacataaacaagaaccaacgagaatacatcagtgccagaatgatacagacataagcagacacctgaggctctctgatacccgcaggtcattgctatgtcctaggaaaacatagccatgctagttataagagttttctgatgatgagtctttataaacagaggatttactgggaactagagatggaatttttaaatgatttccatgttatggatgacctgtacttgggcttatgatagctctgccacatcttgagaaataatttattgactaaactcgagttggcaaatgtaaaaactcatttgggttagctagcttgtttacttgttcttggcattctttcttcttcttatttcagttgtaggcatgaagccacattttgggctgatcatctttataataggcttatggttttataacatcagattttgaatgatagcattttctgctctctgtgtttcctatcacctgtagaattaagataggtcaaatatggaacagatggattgaatgattccctagaattattcactgacattataagggtgcctcctgtggcacaaatagaaatatttctgagagttgtaaaaattaaatttttaaaaatcgaatccaatttttctattgacctgcgttagaatttctgagacattctatcttcatttctgattgattttcaattagcaaaggttcctgccattttaactttaaatttcttagttcccctttttcctccaagtggttaatgatctgtgaacaaatattggagcaaatcagagatgcttcagtgtacagtcaccctatagatatttctggtgtgcaagggagtgagctacctgggagatgaggaaccttggttctagtgttttctctgccaccacagaggtatgcatctttgaataaggtctttttgcctgtttcaggcaccattctctcatttgtaaattatgagctccattgatcctatctggcttcaatattctaccgacaattgagtgggaaaaggaaactttctctgaatcataatctctcaacttttcttttcataaattttcttaaagtggattatacctatctgtaagtggataacagcctccatttattatccttatttttatttggctttttttttgacttgcaaattcctttttggatggattagattgaaaatctttgggaggctcaatcagcccagacagatttattcattctttattctggatgaagaagaggaaatagtttaagatagatctgacatggaacattaatttgattgaagcctttctgtgtgaggagtaattgtagcatcttcattgtcataatggagagattagcatggattagattagcttgtgtacaaaggttgtacaaattgattgctgtgatttgtaggctgggctgatctttatagtcactggcatgacttcttaagcattatagtcatgatttctttcatgtggtttacatgtggcaacaagaaaagcacatttccctcgttaccaaaaccttgtgtctcccaatgggaacttgacatagactcaaaaacataagacgtgtacatataatattaaggagatggcactggtcatctggcctgctgtctgggatgacagcacacattggccaaagacagaagagttcccaaaacagatgttcagagaagatggctagaatactgttgaaatgtggtctagaataattatgaacataagcctaaaaaggtagccaagatatggctctgaattatagccagtcatgggattattatttaactccagtttagtatgtttcctgccaagtatgtgccagaccctctgaaacagaatctggtttttgccagcagtgcttagcaactctatattttaagtctaaattccaaaaaaaaaaggaagagtaaagaatactaaactgctttctgatgggagtaagttgtatttcaagtggcctcagaaatctttttctctagaggagactttctgtggctaagaggaagagagtgggcacttctcccctccactgaacccacctggacttggtctctctcccaaggctttcactgcaattgaaaggctttttcactgccctaggtctctctcctaaggctttcactgcaattggtacatgtgttcagtgactattagaacttaaatgatcactctcatcccacctcactgatctcattttccaaatttctccctcttgctctcccattctagggaatctggccttcttcttggtcttcagatgcactgaacatcttcctgcttgaggatgtttgctgccttaccttactctgctggaaagcaattccttccaatggtgcaggtctcacttccttacttccttcagattttcgctcagataccatgttattcatgaggcttccctggccaccccatttaaaagcagcaccccaccagcattgcctatcacccccaccctgctctgtattacctgataacactaatgaccgtctggcagattatatctttatttgcatatttattatctgtattctgtctttagaatgaagayagaggctttattccagtgactgaaacaatgcctgacatgtaatggaactcaataaataattgttgaaataatgaatgaataaatgattagcctttaatttgtattcattcgtacacattacattggggttttctagaagacagtatgaaaatttcacttaatttgtgactcaagtacagaaagaacgatagagatcagaggttcttaaacaactatccatgaacccaacgctgtgctttacaaaatttaacgtgcatgtgaatcgacagaggatctcgttaaaatgtgaactgtgatttagtagtctaaattggggtctcgggttctgtgtgtccgacaggctcacatacgatgcggatgttgctggttctaagattgcactttgaggagaaagactctaaagtacctgtggaagggattcaaggggttcacaaagccagggttatgaatgtccagtatcattgttatagcaaagaactgaagtgctagtttctagaaatttctggtttatgcaataccaatgaacagatcatttattggacattcattgcagagctttcaactgttaactatgcatggttgttctgtatgcagacataaatataggtataggagaatttctttttctgaggaaataatagaaaatattcatcagtttgtcaaaaggatcagtccaaacaatggtgacagccattgttaatggatgatggcattaaacaaaagaaactttaggtatcaaaccaaaacacatcataaccacatcgtaaaagtagtgacaaaaccaacacatatgtttgcaaataccttgggaagattgtgttttatagcaatagtttttttgctaaacaaacaactaacttttaaagttaacatttgctggagatgatattttcccagggaagtatttaaatgcttggaacacacctatccaaagacaaatatttgttttcccccagccactggaaagagaccccaactggaaacattgtctagaaatgaatatttggaaactctgaggccctctataaatgccattgcagtagctcactgtccttctaagctgaggccaaaatgccctcaaaggggccttggtgtagaaaagctgttttcaggcaaaaaaaaaaaaaaacaaaaaacacaacagcccatcaagagctgcatagcttttcagtcaggaaacttacccccaggtggatgtttctcagccaaggagtgtgggcaatttagtttcaaaagtaatttggaacaactgagatgttttatattaaatggtcctactaaatagacatctagcacagggcttagccaaattctagaaggcctcgcatggtatggtatcacgatcctcataattgctaaaaatattactcataatcataatggctaacaattattgagtctaaatatatgctaggcaaggtgctactaaccttccatacattttcttatacaatatttataaaactaattcggatggtactataagtttttttgttttgcagaaaaggaaactaatgcatggatatgtgatttatattgctcaaggtgacaaaattgttgagttgtagaattgggactcaaattcagatatgctgattccggggctcatcctgctaatgactgtgctgtactcataatcataacaaattgatttttggtgaccttgaaaccctgcttaggaaactaaattttaagattttggttgaatttaccctcagggtggagaaaacacaggttttcataaacttactgtcatcaaattaactatcctatattatttttcagaataaacactcactacttgttaaggaaatcatggtgaaacttattcatatgagctaagagcttctgcattcccatttcatggaaacgtggattttccacgtgtggctctgtagcatggcaaaatagcttggtgtgcaaaaataccctagggtaaagataaatgtaattgtttttgaaatcaaccacttgtccctaatgctcaatctgtgcttctgagaatttgccgagtttcaatgctttaatgtgtgtattgaacagggctttctgttgcaaatagcagaatttgcacacgctagttgaatcagaaaacaataacgtaacaacagatactaataaacacgtagaatctcrgagagtgccaaagagcagggttctggggctacacagccacaccttaggacttctctctaatcatatgacttctcagcacctgtgatgccaggacttggcctcccaaagctgaggaaccaaatgcctcaccaactgctcctgccagaaaactggttctccctggtttggtgcccatactctttgaattttctggctttaaaaattggactcatggtgtgagaaaattccaaaatgtaggaagatcttcaaagatgttgagcagtcaccacgaggaagcttccaatgttgtgtatttcagatcagtgttgtggagtatctttccctttatcacacttttccttcatttttactccctttgattgctaaatctttacagagagcagggactctgttcattcagtccccagaatggcaatgtgttaagtccacaagaaggcttttcgtggacttttggagtctgatcataaaggagaaatatgtcttaaaaaggcagtggaggtgatgtggtgaattttgtgcttagcatttttaacttgagaaaaatgataagacaggccagtcaacacacaatgggcaaatggagataggtgactgtaattcagaagtgcacacaggactccaggtttgagtatgggagttgtccttcaaggattggcagttgaagcattcaccagagcatggatgtgttttctgagcaagagctgtcaataattaggatagaaaactgaacgtggaaccctgaagacctctcaccctgtgccaaagtccaggtgcagaaaagaaaggtgagcttgtgataaagagcaggcagagttcagaagacagccatattattttggtgtcataggggttaaaggaggcaattcatgagaattgattgcttttttctcactctttattgagatatagcttctcaaatgtaaagcatgatttgaaagagatcagtaacaacagttatgcattacatttgaggtgtgttttgtacttttcaaatttgttttcaaatccccatcacttcatttaacttcattcagacacttaaattgaaaattactttctatgtgtggttaaaaaaatcttgcattatttttgtttttttctttaatctaacttaaacatggaagaaaattcagttgtgtgtagttaatcacaggtttgaagaaattaccttaattctattttgagaaagaaagagtatcatgtggtatacagagtgaaggcttggatacctccgttgcacaagtttcctgcttagctgggacctggtcaggccacttcacctcccatttaaaacatcctttagaactaggtatggagctaatgttttagatatgaaaaataattattcacagcgtgttactataaaacatatgttcatagattcttacatttgtatacaaaacaagaaatcacaaagctttattcatgcagaaaaaattaatttgaaaaagcccactgtatgccaagaaatattcttgatgcttggaggtttggggttgaggtagcaatggggagataaaatgaatatggcttgcttcttgctttctgcaaagaattgagtttcgattctgacttaagagacataaacaaggaaaagtacattctccatgctgcatatgtgtggcttaggccctggcttgatgaagggagatttggtattttgttaatgtaggaaaaactaaaccaaagtgtcttttctattctctcatttaacagtagtcaacacagaagacttctgtgacctctagtcaccaagaagtgtgtggggatttctcactaccaacaaataaaccatcagttctgcagctgacactagctgggtgtcctctaattcaatgctactctgacactgtctacctggagatacagtcagatccctcagcttgagagctcagtccctaagactgtttcctcccctcactgcagatgccagtcacaagctccagtttgttgcgtctgtgcttccagccagctggctataaattggggttccctcaacttcccccttgggtttgattaagttggtagagtgattcacataactcaggaaaacacttacttacatttaccatttaccagtttattatacagaatattgtaaagaatacagatgaagaaatgtgtaaggtaaggcatgggtggtgggggacagagcttctatgcccttcctgggtgggccgtcctccaggaaactctgtatattctgttacccagaagctctctgaacccaatccttttgggtttttacagaggcttcattatataggtgtgattgattaaaccatcggaccctggtaatcaacttaactttcagcctctctccatccccagaggttgtggggtgaggttgaaagttccaaacctctaatcatgatttggtctatccagtgaccagcccccatcctgaagctacccaagactggcagccagcagtcaactcattggcatacaaaatacatagtttggaggctccactgattttcagtgtggtaccccaggaaagtggatgaagaccaaacatgtatttcatgaagccttctatttcagtagtaagaaaaatactaaattataatacgaatttttttataccagcaaagcagttgcatttgcatctttaaaatgcaagtgcaacttctttttagagatctattgcattttaaagatgcatttcatcacttattacagccaaatgacttgcccaggcattagattttctgttgcagtgatagcagggatttaaataatgattatcttctctttgacctggtgaatttcttattaccctgcatatagacatggttggattgtactgactttgcaaataccacacaactgaagttggatttctgttgtccttcaatcaaccatctacctaagcctcaaaccgttttgttttgcttaaaaacagaatgagtttggcaaacctagaaaagtacacaaaggatcatccatggatataggatggaagatgtatgaatatggaccaacaacagtgtttattttaataattctaatattgttataagttgtcataagcttaytttcgtaattagagaatagtcttcaatttacactgaatgcatgtttggcaaatatactaatgttatatatgtacttctcttgttcagggcagtcacttgttttaagtaacatgtttatctttattaaaatatgaatttcatgcggttttacagcaaggttattggttaaatcaatattctcaattaatgaaactagtgacatcatcatcaagagcaatagctagcatttgttgaatcctgactatgtgtcaggcattattttaatcacttcatatattttaactcatttaatcttcacaatggctctactatatagaaacatgtattaacccaattttgccagagggttgagacacagagattttagggaacttaggcaaagttacatagctagaaattacagtcagtgattgcaaagcttgtgctcttaacttctattttatcttgtatctgtaaagatatttactaaccaagttaagtgtccttagagcatatttttatagtataaaaattgggaaaaaattaagataaagaaaaaaacccataatcctactgctgaatgagagctctgttaacattttgaggtacacatatttaggctttttccctcctttacatacattcacataatttgtattataaatgctcttttaaattaattttattcaattaatatattttaaaactttccccatggtattatttcattattattttaaatggctacattaagatatggatatttaggcttgaaataagtttaaacaaacctattgtcttcttaaatctccagtcatatttccatgaaggatggcagctcttagaagtcatggaagcaaagaacagtacccctcaggaccattgtaagaaaatgtcttctttgagagttcttaagactattagcacatctgaggacattttcctaaggattcatcttggtgtaaggacacactggggatattttaatttgtagtgatttgttgttgttgagcaataaacagtatatacctcttgaatttgctaaggaatgtgtgagcatacagtgctggtaacactacattagttaactctctttacctttcaaaactgatttaatgaaggtattttaatgccgtttcatagataagaaaatgaagtgcaaagtagttaacttgactaacaacaagtaagtgaaggagacataatttaagctttagcacagacaatctgtctcttatagtgaggcagtataacaataaatatgtggaggagatttctaaaatttccagtgtatgttaagaaaacaatgtattttatgatgttttagagaactgcccattataaccaactgataatgaaattcttcatctttccatgctatcatatttttcccttgtcagcacactgacctaggaatcaagaaattttggttctaatactcgcatttccacctttctgggtctcaagtttttatctttaacataaaaggttagaaaacttgaaaatcttaaagtctcttcttggttcagagagattagctttatggagttgtagagcctgtgtagaagctttataaagtggtttagagtcaattgacctcattggagaaaaaaagtagtcagtaagttcttcacctctgcaaagtgcagactgaatgtggagaacagaattgttgttttcttagctgtggctgtagcaggctgttactgattaccctcataagatgttttgaatttgtcttggaggaggtggctttcagcctgactttcaggctggctttgggtcatcctgagtaagaacaagactggtagtatatgctgccaaatgtaaaattatataactgcccaggagagctgtcacacgtggaggatactagaggctgccatgacaatattagccaaaaaatgataaaccacaacgtgatagaaggaagaatcctcactttatagttgagccccgagtaagtgaggaaagttgtgcaagtttgtaacttcagtgtgatggttgaggatggaattaaagtctcctgactgcttatgaaacctcccacctatatgtktttacgcaaaatgtcatggcccttacatccttttgtttccattgctatgatggttctggattgtaatcctataagaatatgatcacttaatgaatttatgttcattatatttcatatgcagcctgaaatgcctctggtttctttattagcaaatcaacagaaaacacttgataaccagattcaagattagacagcaaagatctacagaaacagattaatatcattttatggcatactatgatctttttttagggaattaactaattactgctcaaggaagcatatccaataatatgcgggtaaaaggatataagcaaaaaggtagcagtaaatagctgtgttttggattccacaaggcttgtgttaggtgaggtcttattcagcatagttatgatgtggtaaagagagtacattgcccactaatacacatttcaggcattataaattgggaaacttgcaaatgcaaataagaaaggatgggtaaaatcaatatgcttagtgaagaagggatcttaagaaatttttttagaaaggatatgggaccctaaaactattgaagtaacaagaaattaggacaagaaactaatatgggaccctaaaactattgaagtaacaagaaattaggacaagaaactaacagtgatagaggaagggtactggcttgttagatttgggctcaccgtttggcaatccatctctaaacccyatcacaacttatttataataataatcttggtgctgatcatcataatctgggtatgcagatttacctacataattttaggcaaattggttaacccctctggacatttaattcctcatctgtgaaggagttacacaagaatacatttattggtttaaataactactgttcaatagagaatttttaaattagcatctgtagctctgttaggagggaaaaatgatgatgttttatgatttcaacacatgacttcatttctttgagctatgtgacagtcatgctttcctccattattcatcaatactccccactgcttaaagttgcaaatatctagggctgggctacacaaagggaactgagagatagcccacccttccgtgcaaattttattgataagagtgatgtggtccagagacatgagacaccttgtccaggggtggttaatggtggagcctgaaggatgagcaggtcatgattctcagcacagaactctttttctcttgtagaaaagatagcaaataggctggatgaggtggctcacacctgtaatcccagcactttgggaggctgaggtgggcggatcacttgaggtcaggagttgagaccagcctggccaacatggtgaaaccctgtccctactataatagaaaaattagccaggcatggtggcatgtgcctgtagtcccagctaccgggaaggctgaggcgcaagaatccattgagcctgggaggtggaggttgcagtgagctgagatcacatcactgcactccagctgggtgggagagtgaaactgtgccaaaaaaaaaaaaaaagaaagaaaaaaagaagagatagtgagatagtaaataggttttcctcctcatgccaactcagatcagttgatagtacctgccagttgagaaaatttgtaaggacgtagtacctaggtactacataaaacactattgctattaataaataattatcactatcagtaattattcattagtactgtctgctatattaacaccatagggaaatagaaaatgtttgccacctcctatcaagaatattctttaaacatattccttcaagataaacgttcaatatttattctgcctttcttgtatctctgtcactcacaatattacctaatgctatctaatgtattctgttcttagagaagtaaaatgtctcagtagaccaaacttagatttgatcattacgaaagatgtcattctcagtggctggatcttcatgaggttttcttgagctgtttttcatttcacctgctgctggatgttttaggctgctgtattcrcatctggtggcctgtctcactaggatctcatggctgcccgggcagtgtcacagctctgagttcaggttggctctagtcttgcccttcgctacagaatcgtggaatacagtgggagatgaagaaggcagcactcttgccctttgtgtttctagtaacttaaattcaactcctggcagcctacttcacattctgatttgggcttctgatgttgagtgctgagggaagctttctcccactgcttacatgttctagctccttggttggctccaaggagttgtgatggaatttcttggcatacttcaagccagcagcagccaggttggccttttccctccacatcttatagctttgtaggattttgggagaaaactgacctggaactagttacatgacctttttcatttatttgggtcttagtgctcatccttgtcacctcttattatttagaatgaaaagcacattactctttaaggaactagagtataaattcagaaacctagaacacatatattaatacacagaactttttctcttttcctagctgttcaaatgtaatacagttttatgttcaaactaaatgaatgcctatttattcctggaagtaaattttgttattttctagtccaggctctttgttttacacatgacaaaatagaagcccagtacacaggagggttgaatgacttgtttaatggcacatggccaaagaaacagaacagaaaaaaagaaatcagaatttgtcagttttctgtctagtgcattccaaatcacatgacacaaccattattggttttagaattggaaaagtttggtttattttttaactgactactcagattttaaaaaaattgtttcattaatagattagtaaaaatttaatactgctgttcattgtagggcttagtaagccattactatgatagatctttatttttgttttctttaagtctgtactggacattgaagtctctctatggtctctggacttacgtcttggccttacagactgtcctgtttcacctttgcctcagtctttgcagtaatctccctcactgagaagtctggaacatgccacatgttcacagtgaggctgttaaaacttccagccccatccaaaacctagacttggaaaccattgtcgcattgctttctgagtccacagatagcaaatgtgacaagtcaaaaatgatgcctaatgttgagcaaggagtctttaaaaagccctactcatgtttctaattctcacacccatgtaattcacaggcatctgtccacaggtagtttgagaacctaactatattaaatttcaatattcagcaaatagctcataaccaatcatatctgaattagaaaagcatgtgtaaagaacaatagcaccaactagcactcatagcagattattccagctatgttataataaggcccttggcaataactcaaggtckgttttttcaaaatgtaaggattaggtgttcttgaggcaggaaagaaaaacaagactattctttgcagatggagaaaaaaatgaagtagattcactagcagagtcactttcatggaaatttggagctctgctgcacagttttagtgtttaaacaggattggaagtcctttgggatgacattttcaatgctgaaagagaaacacctgatagaattgagtctcaatgaaacagaaaacctgctgaattgaaaaggggcttcactcagtgactaattttctaaagtgagtaccccaaactgttaataactattttaaagcagttggatgactacattcaagataaaaaattatatgggaataaaaattgtcaatatatctgattttggtaaaactaagcacacaatttaaatttatcttggaaaaccttagtagttattggaattacttgagaatctattgcaagcaatctaaatgaattcttccaaaacatgtcactggagcaggtactcaagaagtaatctgaagtaaacaaacaaaaacaaagctatatttatccttcctcttttctgtgtaatayaatccatgggaagacaagaagaaatttattttctacttgtgagatttggggatgatgatgctttttctatccttatcaccatttgtcaagatacaactttcattactttccagtaccacctttgaacagcatcttcttttttagtatattctcccttcctccttccatctctccattctttcttccctcctcttttcttcccatatttccttccttccttctttctttcattttctctctctttggaatctcttctcttaactttatgttttccccaagtgatcagctgtttttatacttctctgctggttcctcctaacagagtctttgcagattttaaagtaaaaccataaagaagaaaacataaatagaatcttcagtgatttcacagcagaaaggcatggtttgtattactttctctcagaggtatttttaatggggtaaatatttatttccagatgacccaaatctctttgttatgtttgctgacagaaacagcagctcctccttctttctctctacagtaatgagattatggacagggatagaccttcttcatactgctctgacaacagacattttataaaccagggacgggctatttcaattcagtttaattcaaaaaaataattattggatacttaccacatctaggatattgttagctgttataaatgatacaaagataattaaaacattgttcttcctctcaaggaatttgtaatctagtatgagggaaactgtgtaaataaatatccaatcctggatgactgccacaacataaaaacacacaaatgtttaggaactcggtagacaagcaaaggaagtagaatagtaaagatgaatgtctcctatttgtcaatattttacttcacctctgtgttgttttgggatatatcaaataatgtcttttaaatttagagttattgttactttataataattattattattgtcataggtagtgttaggttgtgtcatttatgtaaatacttatggagtagtaacatgatatagtagtctacctcagaaagagatttattgagtctatgatgctgaattatagttttgtaatatgtttctaaattctttatgatggagtcccactctatcacccaggctggagtgcagcagcacaatctcagctccctgcaacctctgcctcctggattcaagcgattctcctccctcagcctctcaagtagctgagattacagtcatgcgacaccacaggcagctaatttttgtatttttagtagaggtggagtttcaccatgttggccaggctggtctcaaattcctgacctcaagtgatacgcctgccttagcctcccaaagtgctgggattacaggtatgagccacggtgcccagcctgtaatatatttcattccaacttttagatagcttctttatcaggtgctgcaataaattgtttgccctagatcgaggtggggagagagccctcttaggatgagctgtcacacagtaaaagataagatttcctggatcagttttctaaagtgacaggcgtgtcccctaatcgagacagacagtgctccattttgacaaataggccagacttctacgtgtgcatatttgttttgtgtgtgtcasagtgagggtgaggttgaggagtcattctgttcttattggaagtgaatcaggcataaaagtgatagagcgcttgaatgagatgattgcagttgaaagacacagcaattaagcagatttcagactttagagagcatgtcttccgggagctatccacggtactgaactgcttctccctatattgtcctgtaaccccgcaaaacaaaccttcaaacattttaaaaccacaagacattttaaaaactggctttggttattccttackagacaaattctctaacctgtgtatttctaatacttgttatttgtttaatcttggctaggtcarcccatttttttttgtttgatattacacattcatccatttatttattcaacaaatatgtaggtacaatcttccgtatgttgggcagcctcctagtggttaaggtgcttaggtttcttattatgtaatgctaattattattacttttgatttttctgggatttactctaaggaagcagatttaatgattaaaataattctacttcgtgtgtgttgtttgaagaacttggtttctggcccaaagatgatgctttgtttacagtacctagaacagccctttggcgtatcgtagacactcaagaaattgtattcacagcataaacatgtttattgttgtggagtgattttctatgaaatgttacaaggaaaatatatattttaaaccaacaagtaatctttgcaaaaaaaattttgaataagaaaaatattgttctaagtaatctagatggagcatacacctagccttaaagagtctagaattgacatgttgggacattctcatatgttaagaccacattacaggttgaccagaaaactaggaagaaatagaccagatacttcctgctcaggcttttatgtgcatatagaagctcagtgatctttttattctgttttactcaggctattctgtattcaggtaggatatctatcacccttactcttctctaaccccatcttaaaaaacaaagcggcggggagtttttcttttgatatcagcaacagataaccaaataagatggcgtataatcctttttttttttttttttttttttttttttttttttgagatggagtctcgctctgtcaccgaggctggagtgtggtggcactatctcagctcactgcaagctccgcctcctgggtccacaccattctcccgccttagcctcccaagtagctgggacgacaggctcccgccaccacaccaggctaattttgtttctgtatttttagtagagatgggggtttcaccgtgttagccaggatggtcttgatctcctgaccctgtgatctgcctgcctcagcctcccaaagtactgggattacaggcgtgagccactgcgcccggccagaaggtggagtgctattcttaactgtccttttgtagttctttgttctaagaatttggaaagacaagttagtcctgacttccatggaaatgttttttttccaaccaacatgggtgtaattctgaaggagaattctttcttaccagtgactcagtccctctgcagggcacagaatcaacagtattcctagtgtttgcaagatcagtgattatatagggtcagtataggcaaactctccatttccaatccgttgttaatgaaatgttatttttgggtgaagttctgagatagactgaatctgagcagaataaaaaaaagtggaatcagcctgagttctagcttctacccctatttctgtgatatgcttccttattgacatgtgggctttgaaacttggtaacatccaaattgtattatcactctcttgaaaatgtcattgttccatgaaattgtgagacttaaccatttttattgatatctcagagaaaccaaatcttgagaactaagagcattggaggataagctcctttcctagagatacttactctacttttggtcatggaccaaatttggagttattcctgtggatttttttctcttgttccttaaggcagtgatagatgcttgtttagtcaccataagttgtgagaatatgtggtctcaataaagacccagcaataccttgtttttctactcattatccagccccaaartttaagatctaaatgtttcctggtgagaatacaaagaaaagtgagctcttatagcctgttgatgggaatgtaaattagtgcagccattatggaaaatagtagagaggcttctcaaaaggctaaaaatagaactaccatatgatccaacaattgcactattgggtatttatccaaaggaaacaaattcaggatattgaagagatgtctcctatttattacagcactattatttatttatttattgcagcactgtatatttatttattgcagcactatttatttattgttaacactatttatggcagcactattcacaatagccaagatatagaatccacctaggtgtgcaagcatgaatgaataaagaaaatgtatgtatacagaatggcttactattcagccaccaaaaggaatgaaattctgtcattcacagcaatatggatgagtctggagggtatcatgttaagtgaaataagtagggcatagaaggataaatactgcatgtccttacttatatgtgagagctaacaaaagttgagctcatagtagtagagagtagaattgtggttattagaggctgtgagggggagggggaagaaaggagagggaacggttggttaaggaaaggagaggagaggttaagaggttggtgcagggttatagctgggcaagaagaatactttctagtgttatgtggcactgtagggttaaatacagctggagatgatttatttatattttcaaagatctgggggagaaggttttcaatattcgcaacacagagaaatgatgaatgtttgaggtgatagatacggtgattaccctgatttgatcattatgcattacatacatgtattgaaatatcactctgtatactataagtatgaataattatcatgtgtcaactaaaaataagagggaaaagtttcaaaacaatatctatttgttgattccatctgtatggcttagtgataatgtaatcttttgctgtcttgcattgttcccatactggatttcatgactaatatctttgcctttgactgatttgaataaaaatatgttaaatgaacagagaatcttgacctcctttcagaggctgaaggattccttaatttctttcctccatttgcttaggaatcagtgccattgactgtttgcttttagttaatacggttttgtttgcttaatacagaatatgtgcaatttaagtgtcatatgtacataataagatgtaatcttttaattatatgatatagcataattatttccattttatatatgacaaagttaatgtttaagaaagttaaataactctaattaggagtcaggattgagaatccagacacagatggctctgacatcagaatcactgctttaaaccactcttcttttctgcttgctttaatattcctttacttcctccataaagtgccacatcagaatatagaacaggttattaatggaagaaatatttcaatattttgagttttttgggtgaatgaaaattatagaattaaaagctgaacatcattttatttggcagtttcatcattatgatttaaaataaatgcagtttttgaagtttcctaatttattctcttgaaatatatttggattgccacatgctgtatattctaacacttggccctggtagggtttatttgtatatgtgtgggtgtactttaaatataaagatctcactgattttaacacacattggaaatatgcataggcaaaccccaaacaactttttattcaatagtgtccatgtatctctaaacttttgatagaaatttgttccaataatggggttactacataagttgaagaaagtcaaactgaagcaaaatttgaaggcttctatattaatgatcagttttaggcgatacttgccaaaayctagttcaggattagaataggctgtgttgacattttaagtgagacatatcagttactctttttcagaaagttaaaataaattctcataatgaaaaaataaatgataattttagattcttttagagaatttactacctttacaaattaggaaaataatattcacagtatccatgattccaaccagttaacatgttggtatatttctttcagttatacacatacacataattaacatataattatatgaatttatatataattttgcattctaactttctatttgacataataacagtcttattttgcacttttatgattttccaatgagatatatctattagccatttctattttttgagttgcctgtttttttgtgtatgcatagatatatgtacgcctgtatatatacacgtatgcatacatatatatgttttttgttttataaaaagagataccatatttctattaataccgtcacagctctgatccttctttctattgtagagcttctatgcatgtattaaaatttaatttagaaccaatcaaggaagaggtcaatctgaataagataatatttgtaaagttcttgcctgtattatgtatagcaactagagctactttatccacagcgatttgaagccatgttgaacctatacaggttaattgatgcaattctcttggaaacatcgtcatctgttggcctataatgttttaaaaaccttggaacagtctcattgttttaagtatatctcctagttttttcctttaatttgtttgatgatatttttattttcttaagatcatcttcagctgaatcctgacaaccctactacatgatcataacaaaaaaagcaatgaggagtctctataccctttattttcataggaaaatattctaatatccacaaatgtgattaaaggatagagcaggtggtggggcgaggtaacatctgatgtgagaacgaagaagcaaacagttgttatttttactctggtcaggtgaaaacaagcagtcattacatgtctaaatcttgggtatctttggaatcattttcagccaccgtagtaagttgtacgtgcttgagtgtttttaaagcatgtcttatagtgaccaaatgtttctaccgcatttatctcagtaaagttgacaggattctattaggacgatcttcacctaatgagataaatattctaattgtaatcatcctcttggaatgcatatctcttctgggaattaaaagtgctttaagtggtgttgctaaacaaacatttctaaagagtaatcataaagttaaatgcctcacaatagcacaataggctttttagttgacctggtttttaatacttttttcattgcaaaatttcttattctggaaagtttggaaaaatgaggaaaaaaatagaaagaaaaatgtcgaatttaaacattttgtcactacctagttaaaatcggggataacattgtgatttagatttctccagtctcctttctttttttttttttttttttttgagatggagtctcgctccatctcccaggctggagtgcagtggtgcgatctcggttcactgcaagctccaccttccaggttcacgccattcacctgcctcagcctcccaagtagctgggactacaggcacctgacaccacgcccgccaatttttttgtattttttttttttagtagagacggggtttcaccgtgttagccaggatggtctcgatctcctgacctcgtgatccacctgcctcggcctcccaaagtgctggggttacaagtgtgagccaccgttcccggcctctccagtgtcctatctcaattcytattcaattgtttgttaactagattggaatcatactgtgcatattgttttataatttgctgttttggctgacatttggaaaaattattttagaaaaaacagccagttttgtagatgaaatggtgttttgtttctattgatttttgatttttaagttgctattacttcatgaagttagcgtctttcttgtgtattggctattctcttttcttttgctataaattgtctgctacatcttttagttcataataattattgagtcattttctgtttaaatataaagtatttttctcatttgtcgctgtaacataatccatttttaagaagcagagcattttcttgacagagttttgaaatattgtgtgactttatggctagaacacagaaacattagttagaatttcagaatcatttgatcagctctggctttgagcctctgattctacttgtagtctccaaaccaatctttggtatccttctgtagagatgtaagttgttatcaccaactcaacatgaaattgtaagaatttataacagtgttttctaaaatgatttctttgatttattcaaagaaatattatctctgataatatatttcagtatttttcatattgctcaatatcagacgaaagttcttataaaagtcctgattgtttcagcagtgatttgcatgccattagcaggtcattcatccccttccactttgaggctcaagttctacactagatttgatttgttggagggagtctacaaactctgctttcactagaaagacatgatctgtgtgctttgctgccatagtgggcctatccacatggctcattctctgtaacactaacttccaggaaagctcttgtatcaaaattcatcaccggtattaaacagtgtcaattatttttatcacctgttgaaagcttaaatgccaacagaaatttgtgcttcacagggcattgggtcctccatttatatttttcaaatgtgtagtatactcttgcttttagtcgtctattacccagtgttcttttcggaaaatatttttaaagttaattatatactcacagataatagtgcaagcaagtttcctccatgttctgctttcctttttctgactttacttcatgctacattccttcacaaatagtaataagaatttatttctactcagaatgaatgttcctcacagtggagagaatttgccactacaaaatgccttctactctgtgtttaaattcctcgtacatacaagcaggttttgggtgttacatttgttcatagaggtatgaaattgagagtcatagattgaaatgttttttatagtagagactcccaaaaaaaggcacagaaaaatggttgatatctagtaggagttatttacatgctgctatttctgatgcttcctatttgtttcttctgaaaaagtcgcccttcctatgtctcaaaacagtacacctgtaaaaccacatcctactgggcataattctacaactgcttctattctcaatgcttgtgttgcatgcttttggaccctaagagaaatcagcaagctataaacccaggaccaagaagagcatatatctcttggaaaaatagcatttgagtgattgaataaaacaggctgttttggggatcattccaaatgcagggaacaatatggatctgtgatacttgagttgttggactttgtagaatatcaaagatgttctgcttttcatattcagatttttaaatagaaggaaataaacaatttttaaaatgtttggaattaaatgggggaggtcatctgtaactgtctttgttgatttttgtgggcatcatagcacagaagagttctcctggcttagcattctggtattgctcacatatcacctatatgctaatttgagagcgttcatgagtgccatgaaggatgagtcagaatgatagacagtatgctgactttttctcctcttattgaatttagtctgatctgctagtgagagaaataaaagggaaataaagcagggagtataatagggaaacctattttctccaaatgttgagatatttaaaaagtctttgttcagtgtacctgcagttataatctttccagagattcatgagatgtcagggctaggcaagactttagaattctatgtagtaaactcttgtttggggctgggaaaatggagggtcacagttagaataattgcctaaagccacaccgacagagagctggtagtggaatccctgttttctattcaccttcctactcagttgcactacaagtttatcctaattcaagtaagcttagacatcaccttgggtaactttctgatttaccaaatccactagtggaccatattgaatttgcttccaacatgaatactcttcatttctctccatccacactgctacccaccaaaatcccatgccttgaatgtaaataatcttagagctgatctgtttgcttctgtaacttcctgctactcattccataagcaacagaagaggcaaaatgaccttttaaaaagtataatttgatcattattctcctttacttaaaatcctagaatgacttccattgcacttaaaattccaaatttctttccatggcctaaagggtctacttgatcagtgtatcgcctttctctagaacttaatctacctctgacccttgtgtgctatgctgcagccactttggcctcctttcttttccccaaaattgaagacacatttccatctcagggcctaagtgtttgcagttagctctgtttggtgttctcttctcctagctgtttacagctttcagccttctgcagagatgttccccagctaccctgccgaatatcgcctttccccacccaatcctttcattaccctattttttcatagcagtaactactaattaattatgtctttatctattgtcttttcccagtctccaactagattgcaaagtccctgagggcagaggtcttgatgtcttttccattaacaatatctcgagtaaccaccagcaatctgcacatagtaataacctgaatattcctttaatgaatgaataaactgaaaaccctaaagttcagtaatactggcctctgtgtagagtttcagaaatatgccaaatatgctttcaagcatcccagcctgtctagtgtatcctttgctctcttggccttctgagatcacttttaattggcatcctctgaagttgttactctcagtcatgctggttgataccccgaatggataggaaatggataggcattttttctgtccatctctaaacatctctgattgggcctaatatacctctcaggcctgctcctctggccaggacccctctttttatgggaagtagggagacccaggaacacagaacctataatatattagaacctgttatatatctctctagaaaaaacagttattttaaggaacgtgattgctggggatggcaagtcagaagcctgtagggggaggcctgcaggctggaaactcaggtagcagttgatgctgctgttttgaagctgacttttttcttctatggaaagcctcagttattgctcttaaggcctgccaagcaatcggatgaggcacacccacattgaagattatctcctttacttgtggtcaactgattatagatgctaaccacatctaaaaaatgccttcatagcaacaccttgattagtgtatgattaaataatgggacatgatagcctagccaagttgatagaaaactacccatcccatcatgcatttgtggtattggagaaaggaaatgcttctccattgttactactgggactgttactgctgagacacaccgaagaggagaatttttagtttttagtttgctttttagcagaattcaaacttaaatataaaattaaccaaattgtcagaaaggactgaaggttatcctttcaattctgagttttttatgtaaaattattttattattagcaacaggttttgaaaacatttatcaattatattcttatatattggtgactttaggtaatgaataaatctggatttatctttctttataataaaaatatggtctgatcaaagtatataaaattgaaataaatattgtcttatttgtgctttaaattaattgtagtataatattaataggatattatataatattcagtcattttagaataggagaaacattttagggtaggataaacaagaccgtatcatgaaattggagattttaattgttttgtaatattaaattttacctctcatgaaaatagagtagataattattatggattatgaaacagcataattagttgtaacagttttaccttgaagaaaatatatcttttttataagcagaaaacttcattttgttttctttaaaatgaagtgaataccggccgggcgcggtggctcacgtctgtaatcccagcactttgggaggccgaggtgggcagatcatgaggtcaggagatggagaccatcctggcttacacggtgaaacgccgtgtctactaaaaatacaaaaagttagccaggtgtggtggcgggtgcctgtagtcccagccactcgggagtctgaggcaggagaatggcatgaaccctggaggcggagcttgcagtgagccgagattgcgccagggcactccagcctgggcaaccgagcgggactccgtctcaaaaaaaaaaaaaaaaaaagatgaagcgaataccatctctactctcaatgtatcgtggacgataataactatgctagtatttctgcatagtattcttaaagaattctgactgaaaatatttaaatgaaatacacataatcactttgccacctaatgcccatcaatcattgccaacattgacttttaataaagacacataaccagagatgatttttaaaaattatggataaattacattagaaaatttagctggagcaaattatatttgattattattaacctgccataatttatattcattaaattgccaaatcttgattataatagtcaaaaagaaaaggtacatgataatgatctagaggtagaacacatgctatcaactggaaaactaattgttcagcatcctaagtgtatttgttgcttaattatatatataatttctacaacaagtggaatgatttacatgaatgtcaaataactggtttataaatgaaacctgatattaagctaaataaaatattggcatatagtgttcacttatgagctaatattcttacctctagcttcatttacaaattarttatgctacaaatatattaatgttccacaactctttcacacttccatcaatatcgagtttattccattacaatgtgaaattaaaaaaaactgtagaataattacttctgcttcagaaaatatagattacctatcttccagtaagatgctgcaatttatttagataactgcatttattgcattgattttgaaaaattgctcaacctaataccctttcttctttgctaattcctggggaaaaggaatccttttcattttgatccaaatgaccattaatcatattataaagtgtaataattaaccctttttttaagtgtcagagacacatgaatagtgattttatttggtttcaataatcaagtaaattaagtgataaaatggaggccataattaagtgatcttgttttctaataagaccaacccattaatgtgcatgtaaagatgcctgtcatcaatttaacagctttctgagtttaatatacattaagagttttatttttggaacaacttagtaatttttagaaacttgagtacaagtgttggcaaaggttctataaaattctgtctacagaatatgtggaacacaaccttgggtcgtatctccaaggaaaactaccatgattaaaaagacaatgctttgtcaaattcacttgttatcacaatctaattgtgtwaaatgccggccacattytgagtagacactttaacttggcttyccttgggaaataggaaatgaagggcccgaaagaactagaagctgcctctcaattttytttcaacatggcaaaagcatttgcatttatctgtgcccctctcttggctacactctcagctttgatacactacttgagcatgtggaggtttacctactgaatgtgacccttatatgaataatatgagacttttgtatcaacagtagtgatggtttttgtttttaagtcacattttattgtatgtcttctctacctctcactatatgacaagtttagtgaaggcagggtctgtggctatcttgtttattattgttttatatcctgggggtatcacagtgcttgatcatagaaagggctcactaaatatttatggaaggaaagagaggaaagaagggagagtgaaagaaaaaacattcaatgttctcactcttaaaccaagaaaataattgtttactttatttcattgtagtaagaaaactgaacatgctactaccttcaataaatttttaagtctgcaatacagtattgttgaccataggaacaatattgtatagtggatttctagcatttgtctttcttaactgtaattttgtgcccgttgtttagtaactctaaattttcctcttcactcagaccctggcttccccccattccacaatttgattctgtgaatttgaatattttcatagaaaacattttatgagtagaattatgcagtatttgtttttctgtgactaacttatttcacttagcacaatgacctccaggttcatccatgttgttgtatatttcagaatttccttcttttttaaggctcaagagtattcgcgtgtgtgtgtgtgtgtgtgtgtgtgtgtatcacattttctttattcatctgttgatgaacatttagtttttttcacagtcttggctattgtgaatactgctgcaatggacatggatttttaagcgataaagaataaagctcttttcatcttttaactggaattattttttagaaaatattttgttccaattttatgatttttttgctattctttcatgattaaaagttatgtttcattattatcaggttgtatatttacatatatattttgtctgatgttaataatggcatgtttactttctttgtgtaagctgatgtatggaaaatattttcctagcttttatttcacattatttcatcttttgtttcaatcattcatcttgtatattttggcttccttcttcccttttactcaacttagaattttagagtgagtaacttttaagataaaacgagtttaacagataatttagcccattcacatttgttgtaattcatgatatttgtgtgtgtttgttatctcttcatttttgaattattttgctttttaatacatcttttctccatttcttctgcattaccttccttctttattattaattgaggttttttgtgctgttcttcttccatcttttttaaactaatgaattacaaaatttgcttctttttatgatttgtctcatagttattgttaaagttttgagacctgtgagtaaaaatattttatattaatacctagacttataaatcagtactaatatcttgtcttgaacaggacttcatccctagaatactttttatttctacatcatctgcttttaaataatcagatattaaatccagattgccatcgtttcatttttaaactttgcagcagagatttttttagatgtgaacataaggtgtctattttctttgcttcttgttattttgtgttgtctttctctttcttgggtaattttttgttttgttttgttgaatcagtaagcttttcagaaaatgcctgtaggtgttaaatttctgagcagttatatatctgaaaatatctttgctcttacatttggttaatactttggctagatttagaatttaaaattatgaaatgtttttctacagacttgtgaagacattcaatatttgtttcagcacatggccttagaaatgggatatctataccaatctaattcccatgtttctgtaagtaatatacctgtttttatcttctctgagatattttggaatttgctcattattcttggagttttgaaatgtcatcaaaatatgtctaagtgctggtcttgtttagtaatcttgtatacctcaggggaaatttcagtctaaagatgtatatcttttccttcagttttttttttctctctctctctccatatatatatatacacacacacacatatatatacacgtatatatacgtgtaaatatatgtgtgtgtgtgtaaatatatatactttttatgtcttataaaacaaacgttgggatttctgtttctgttctctgtctaaacttttttatgctctccaggccatcatgtgcttgtcctataatctggaccaaacccanggtacacatttgtagctcacaaattcttcactagtcaccatctctgacttatcctaaatgaaatttttttttatttttaaagtgattatattttaaatgtttctttttataaaatgccaaccagtttttcttaatggctgtaatgtattgaatcccttaagctagttcattattcctatttcaagatttttttctactccttctattaattgttttttttttttttttttttgagaactagttttgtgttgtttgcattggagtagcatatacaagccattgtttctgacccgagtgctctcttttagaattttttttttttttagggtcagatcccctcatctagtacctctgcctttaaccgcagtctcatgaatccaactgctattcagcaccttcgactcagatgtctgataggcctgtcaatcttgggagacccctagctgaacttccacagaaggatgggtctgctccttccctagtctccccatatcaggagatgatggtacccttcaccctgtagctcatgccaaccttggattcatcctgatacctttcttgtcctacattctacatccaatgtatgaacttgtgctcacttttatgtccaccttcaaacaaataccatatctgactgtctctcaccactccccagctacatccctaatccaagtcaccatcatctttcacttactctattgcagcagcaatagaccaatctgggctctgcttccattcttttcaccctatgtttattatgtattcagcggcctcagagaaatgtaaaacataaatcaagttccatcactccctgcaaacaacaacaataacaccccttataatggctttaagtcctaagcatgaccaatacagccatatgacatcaaggtcctgcttacttctctgactttctgttctataatttctataatgtctatcattgttcactgtgtttcagtcatattggtcttcttgctattttggggagtatgttcccacctcagggcctttgcacagctgtttcctcacctagtagctctttctctagatattacttggcttcctccctccctttaattgtttctcacacaaaatgcacctcctcagaaaaggattgctctcatccagttatcatccactgtccctctttatcccttttccctgccctttttcttaataacatgtaacgctgcctggtgtgaccaagataggtttgtttgtgtttgttgttgttcttcaaaatagaaacatgaccagggtatgggactgatgacttctccaccagcatatcctctgagggtgctgaatcatttctgttacatagtgggtgcagaggaaatatttgttacatgaggctatatatcaaagggcttcatgaaggttttgctttactgtgaatctggagtcagataattcttttctttatttctcctctgttttctttgtagagatcatgaatatcttaagctttatggtgcctctctctctatagtttggctatgagcctccccgaggcagatggttaactttatttagaaagagggtttcaggactttattctagtgataaataccgtggctgctagtcatagaataaacaagggcatgagagaaggcagccaactagaccagctgttcacaccatggtcctttcataattatcctggttactgcctcttggctgtgtgtattgcttgactccaagtgtggggtgtcttttgtagagctttatctggagctgttttagggagaatcaatctcacttctagtagatttctcctgtgtaagtgtgggctttgatttcctctacttctatttctactaagcccattacttatattaatcccatctactttcaaccttcaaggacttttatttttcaaatttctgatctgatagttaaaattttccccgatgtgccatgcacttattctaaaatatgatttttttcctggtgtcaataagatttggcgtacagggaaagacagatatatatgacttaaattttgtcttctttgcctctattgtatgttactgtttttatcttctgtgttgttgttgttgcttaacaaatgtagctacacatttatatcttatcactgttttcttaaaaataatttgttttgttcttctcccttttatatttagaaaatatataaaaaatgtggaccatgcctttgatcagaaattattatgaaaattgttgtttagaatgggtttgagggtggaaaagtttattaagagattgtaatttaacgaaagagaggtatgaatattctgagaattgaggtgtcttatgcattaattggattgctagatggccccactgatttcctgtttttcttgttgtgttaatctatatattgaattaagcacctcaaactatgagttattagatctcatatatctatatccctacagcaatttctctaagctctggtcatttctgctactttgtaatctaaaactgcttcataacttcctagatagaaatagaatatgtgggtgctcagagtatcagatagaccccatatataatagctatgaaatttcaggctctataatggattataggatatttttgaaccttggtaggttgtaggattagttgcttaaatacatagtaccatagattgcaaatgtttaaaaatcttgatgctggaatttattagaaaaacaggaatgaatacagtttgagaggctagaaccgtggatttcaaatgctagcctgtatgagggtcccttggagggcttcttaaaatacaagttgctggttgtcattttcagggtttctgatttacgaagtataggatgggcctgagaatttgcatttccattaaattcccaggtgatgtggctgctgctcctgggacaacatttagagaaccgctagattagacagtctcacaacagggatttctagggacagcttaatggttactttatgatttgaagctggaatacccaattaggggtttttccagtctcatttcatttcatttcatttgcttccttttttctttcttccttcctccttcccttcctcctccccttcctcctccttccttttttatctcctctccttgcccatcccctttcctcccttcccatcccctcccatctcttccccttccctcccctcccctcgctgctcctctcttctcctctttctttctttgccatttcaggtgctttatctcttaagcactgcactgctttgggttatccatttaagcttagaaggagagcaacagaaaaggaattgaaatgtaaagcagatatcaagagagcaaaatttgtcattaaattggaactagcaattaatttgtctatttattcatagtctaagtgtgattatcaaaaatgcttgagaatcaatagaaccacatgggtttttcaagttggataggaccactgaagctacctggtggaaacacatcattgtattgatgagaagactgaagcaagaatatgaaaagcatctgaaccaatgttttcttttccacgttctcatcactctctgctacccacagctgcccgtcatggatatactatatgttgtcagctatattttgattacttctctgtatatttatcatcatagtttactaaaattgttagtattataccttttgcatataagaaaggatgaacatttctagttcttaaaatgtaagaataagtgattacatattaccttgaaacagtatggaacactttttactttaaaatatttttttcaatttttgtgggtacatagtaggtgtatgtatgtatggggtacatgtgatactttggtgcaggcatgcactacataataatcattttccagaaaattgggtatcagttgcctcaagcatttatcctttcaattaatgctcttagtctgttggtattaaaacaatttttattttctgatgagaaagttgctgtcactttgatcattgactttgctacaggaattttcttttcttttcttttcttttctttttttttttttttttgttttttgagacaggtctccctctgtcttccaggctggagagcagtggcacaatcatggcttactgcaatctcaacctcctgggatcaagtgactcccctgcctcaaccccctgaccctcactatctgggactacaggtgcacaccaccacgcctggctaaattttgtattttttgtcaagacaaggtttgtcatgttgtccaggctggtctcgaactcctcggctcaagtgatccacctgccttggcctcccagagtgcggggattataggtgtgagccatcatgcctggccaggaattttcttgaatgcttcaataactttattccatttaactctcacaacaatcccatcaaatcaagtatcatgattatgcctcatcattcatttcacaaattaataagcaaagtcttagggggttatcacttcccaaattattacatgccagtgaaaaaccaaagtttgagcttgcacacaaactttgaaacactattcaaaagcagtgttttcagcacctgatctttattgcctcacagagttttatacagatacaaaattatgaaatgtagctggagccaggaactatgacatggaatatacctggcatacacatggtctttgtcttttcctacatctgtgaacttgttgaagctttagatgtcttcccagctcagtgatcatgaagacgtcctcactgatgagtcatctttacttgtcatctctagctacctggaataaaacacccagtgtagtgtctgggatccagtgggcatcgtgggtcagttagttctccagccccggttccttttctggttgcctgagcttggaaaattcataaaatctctttggacctcagttacgcaactgtgaaattgtgctatagggtgacttgaaaccactttgtagattttttgggagagctaaattaggtaatgcatgtaaaagcatttagtgcaaggtctggcacataggatatatttgctaaatattcgtagaatcagatgaataactctcatgaaatattttgttaaacattgtgattgttcactgggaatattatatggctgtgtgtgccactgtccgtgtttcccctaataattaataaatattaaataatttaaaattaaatattaaataatttaaaattaaatattaaataattaataataaatattaataaatacctttggcaagtatatactatgtcttcaaaatgtttcttttccatttaatgttttcatttatctgcaacatttcttaaggcttatttgcatgtgggtaaaattcaggctacaataatagtcaaggaagtatatttctcttgttctgctcccatacaaatggtgcccccctgcaagcctcttctgaattattcctggacacccaaataaaaatggtaatttttctttccttttctcctggattcttattctaacatctgctaggaggatccacaccctgtcctaggctagtagtgtacagaccatggttttgatgtctgtgcaaaaggtacaggtttgtttgcatctcttcaatttttttcattgtatgaaaatataaataatataaaatgtactatttttaagtatacgattcactggtattaaatgcatctataatgttgtggaactatcaccagaatccattgccatagctcctttaatcttacaaaactgaaaagttgaactctttacccattaagcaataactccccattccccctcacttaagccccgggcaccactattctactgtctgtttttatgattttggctattcaaagtacttcatataagcggtatcatgcagtggtatctcatctttttgagactggcttatttcacttagcataatatcctcaaggttcatccatgttatagcatatttcagggtatttttcctttttaagactgaataatcatccatttatagatataccacattttgcttatccattcatccagccacgggtacttgggttgcttccactttttatctatcatgaataatgctataaacatgaatgtacagatatctctttgagtccctgctttcggttcttatgggtatataccccgaagtagattgctgcatcatataataattctgtgtttaaatttttgaggaatcaccatactgttttccacagcatctgtaccattttgcattcccaccaacaatatacaaatgttccaattcttcgcattctcgccaaaatttgttacatgttgttgcaaaagtaattgtggtttttgccattaaaagtagttacttttgcaccagcctagtatttttttttctgagtttttttttcttttgttagtaatgggtgtgagtggtatctcataatttttatttgtatttctatagttgttattgatgttaagcatcttttcatgtgcttaccagtcatttctgtatctcctttggagaagtatctgtgtattcagcgtttgcttattttcacattgaattatcagtattttttgttgttgaattttaggagttctctatatattctggatattaatttattgtcaggtacagatttggctttgatggcactaaagctacttcttcttaccttcgaagtcacagtacctgtaatgattgcttatgtttagcaaattaacatcattaggctttctctgtcattatataaccccttcatcctaagactcacacatgagcacctcaactgaggctggggatgtgtgtccctgttgttgggggaacacatgtccttagctctgactccctttctccagggtcatttctatcctctcttccgatgacggtctaccccacagatcctaagccacatccaagtcacctgaattccagcatgattcttacttagattcttaagtttaaatgcttgtaattccttcttcctttcctctccttattaagtacctttaaggaagtagaaaactctcaacatttagaaacacttacaagcatatgaatttccatattattaatgcctcgtgaccaagatgtcctgacacatttatatggtcctgtaaaagttttataaataatctggagcatattatttctttatatcctcactttgtgaactagacaaggtagatattaaaattccaagtctcaggaagtttgaatgatttttcttaagcttagtcagctaattaggagcagaatcaggactggaatttagggcttctggctccactttatctctgaggcttgtactattctactgggatatcattagaagaaatgccaaatgaatgccattgcctcttcagccctaaacacaaagcccagttaagtgtttccctgacatttttcctgacatctataaaaattcatattttatttttattcacatgctgattgatttagatgttatgaaaattaaataagttccaaaaggcagaagataggctatacacatatttttaaaaatttgtcattgttcaaacaatattgaatataaaattgaaatgtccctcattataaaaaaaaattctctaagagtgactagttataaggttatatcttttggcatgatgcacctctaagcagtgcttgcataaagtctctaccaaagctgacagagcttccctaagggcctaaagaacttggcaaatgttgttgaacaaaaatgacaacaatgaaactgtgtaggaggattctgcattagtgcacctaagaatgttctcgctaatttgagcacttctcaccatggaataatgcttttgttcctctctgtctttttctgctgtctcacagagactcctaacagggctccctggaccaggcttagacatcaatagggatggactagaggcattccatggaggtgacaattacagaagatcagaagtgcctagctacacactctattttcttctagcatctgaaattattgacttgaacccatttgtggggtcactaagccaccttcatataatatttattacatgtgcaaagtcagaacatatggagagcatttgcatttgaatgggggaaacatgctgttagataaattagaaaatctttatatttgcatttttctttatttaaaaaaatcaatctgtggtatagtagagctaggaatattccctttttggttgacttcttcactctgtgtttaaactttctcagcattgaggcatgtgattaaaaggagctattttcctaatacaaacaaaagcattgaacatcctgtgaaacaaaagttgttcattttaacttgcgttatatggaaatgtgacatgttttagatttgtgtaagctcatgtacttgaaaatcagacttgtctaaaatttcttttgtaagatattagagaacttttgaattatacctcttatttttgaatgtacattcctcagagaatcatctttatgcacaaataatgtttattttatatttttaatctactttagcagacccacstgattcttctacatgtaaggttgaaacagttttgagtgataaagaactgattttatggagcaactaatgattttgctgttgctacttttgtgccagcaaatacgtaatccacaagaatgttataagaaagatatttatcaagcctctaaaaaaraagaaagtaatcaaaagataaggatgcataaatatcttaagactactcatgacatcaaggaaggtgaatcagtattaataattcactagtttgtgcatacttattgtcaggtgctgggtcaaattaaattggaatgatttgttgacatgaggatttctgggttcatgatggattcacattaaaacaatttttatgttttaagccttctcccatcaaataggttttacggtcttgtgtacacattacatgagggaaatagtactttaacattttacatgctggtgtatagtctatatcagcagtccccaacctttttggcwccaggaaccagtatcatggaaggtaattttgccatggagtggggttggggaaaggagatggtttagggatgaaaccgttccacctcagatatcaggcattacattctcataagaagcatgcaacctagatccctcaaatgtgcagttcacaatagggttcgtgctcctatgagaatctaatgctgccactgatttaacaggctgcggagctcaggaggtaatactcgctcacctgctgctcacctcctgctgtgtggcccggtccctaacaagaccattcaccggtaccagtcagtaagctgggagttggggacccgtgttccacatgttataaaaacttaggctgggcgcggtggctcacgcctgtaatcccagcactttgggaggtcgaggggggcagatcacgaggtcaggatatcgagaccatcctggctaacacggtgaaaccctgtctctactaaaaatacaaaaaaatagccgggcgtggtgggcgcctgtagtcccagctactcgggaggctgaggcgagagaatcacttgaactcgggaggcggaggttgcagtgagccgagatcgcgccactgcactccagcccgggcgacagagtgagacttcttctcaaaaacaaaacaaaacaaaaacttaaagagttatttgagccggacacagttgcatagacctgtagtccccagctacttggtgggctgaggcaggaggattgtttgagtccaggagttcgaggttgcagcgagctatgattgtgctacttacactccagcctgggtgacagagcaagtccctgcctctaaaaataaaataaattcggaaagaattatttggtgattcaagtataaaacaaaatctatcagatatttgtgaaaaacatattgttacattgttacatgttttaagaagggaattaaactcctagactctgtatggtataggagttcaacactataggttggtctatacatctaatgttggatatgtattttgtgccttttatttaaaataacatacattttatggcatttcttgctttgcattaattactggccatacccagaatcctttccttcgaataaaataacctcttttcccaaacttttacatattgttcatattttcaaccccctacacagttgttaggtcttgaatttggaagaattaaagggaataacattaatgacagtgaactatgaattaggaacctcacccctatcaatagccaatttccctccttttcagttttgtgtctcagtaatagtccttaaaacaacaaatgatacattaagtgacctgagccaatttcctcttgacatggaactattcaacaaagcctcacataagctaacatttcctaattagccccttaactgttgacttgagaaagggtttgcaatacaggattcttatatattaataaaaactataggtaaaaaattcaagatgttgttgaatctttacagttcgactcattattcaaattcttcatctttacatcaagtttctcatctttacattcctctaattcaggtcatctccacaatatgtccaataaaccgtatttgcaagatatcgggagaaaagcgagtctgcctctaggaattataactgatacttcctttgtgtgatgaacagtgattttttatgtatttagtcatatgctattagggaatagatatctctagatcagagaacagattgtgtattagtcacagaacatcttagcactagttcctccagccctagttcctgtggagtaacgcgatgagggccagatatctatccccatgggcagcagtgttgcaccgcatgagaggaaccctggaattatgaaacttggagcttacacagggcagctgggcacatctgcccttcctcccctccagagatagaaagacttgtatgtattctggcatgtaagcaaatgactctcggggagagtaaaaagatgcctccaggttttatttcatgagcatatggctccagaggagacgcatctctaaacctctcaggaacagttcattgtcttttacttctgagacatactgtccattcagtcattctttagccaaggttgccagtactctttgctaagaaaccccagatcatgcagaaatgtgaacatgttcacagagaattgtctctcaatcaatagtacctagtacattattatacaaagttctggggatgtttggcagggattgaacccatgaactagaattatgagcattggaacttatctaaaccaattagcaaataaaaaagttacacatttcttgagaaaataattttatagattaataattacatgtaggatatgcatatctcaagtcatctgagggtttaatgttttgtatactttatcttacaaaatagattccaattcatgctgtctggatatacaagcattaaggccttccaaaggcaaaatcaggctaggtgtgaaacatgagtggtatacggaggtatagcaagtagtgtcccttgatacccttggggaattggttccaggatgtcccagagataccaaaatccatggatgctctagtctctgatataaaatggcatagtatttgcatgtaatctagcccactttcctgtatactttatatcatctctatattagatataatgcataatacaatgtaactgctatgtaaatagttgttttatttgcattgtttagggaatatgacaagaaaaaagtttgtacatgttcaatacagatgcaatgttttggaatgttttggggcatatttttgaatccacagatgcaaaacccatacatataaagggctgactgtatttaagttcctcattctggtgtgattaattttatctctttttagtatacttgtggttctcaagtcactaatgttttagttataaggtgaaaggcacactgtgtaattgaatgctaaggccaattctttacctctgatgtctggaataagagccagatttcccatccttttatggaactacaagcgtcatggctattagcaatcccagaatagttctactcccactttggctgagtttaagatctttttctaaagacagtaaaaagagcatcagaaaagcatttgtgaggctgaagtacctcacataccaattttgtgggcacatttttggacccttaagttctttttgacagttttataaactcatgcccagagtagtttcctttatttaatatttgtcttaccctctacttacaggaaatgcaaggctcatcagctttttcagggagtagcatgactcagagtctgatgtacttgaaaaaaacacagcgggaatccaaacacacttatgtcatttttatgtgttagagagaaaccaggaagcatgaattctcacttttcttaacgtctttacagtgtcaaagggatatttgtgaaaagaggttgtgggaatcattgttctgaagtgcatccaagattagaagcctggtttatgtgtgctattttgcctcccagtatgagcagcctttttatatttattccaagtattactgtaaactactttttctttatacatacacaatatatctttgtctgtgatcagagcggagcttcatttccactgaccaatagaagggcatttttatttgatttaagtgaaacttggggcataatgcattctttcaaacctctgattggacatgacaaacaaaaagcttgagctagaccatggtcatctgaactatttccaataacttacctttgtaattggagtattgcctcaaatatttccctgaactctaattaccatggatacgatatcactcaacagaactttttcttaggagcactaagagtgtggaagacagaggataaatgttgtagtttcatttgattatctctatgtggatgctcacatttttttttctataaccaaccagtttcattttgatgagagtgtttggagagatggttatgctgacactagcctaggtaagagagtaagtctccctctcttaaaaaaaagtgacaatgtcacttctgctcacagtctgttgatcaaaatgaggcaaacggccaaacctgatgcctataggttgaggaaattgtgtatttgtgaatagtaatagcacagcagccactaggcctcccagtcgtactggagatttctaaaaggcaaagtgtttttagtttgttttaggtaataggttgatatttagcctattaaaaaggcagaccctggcttgacagacaaaaattaataattaatttgggagccagatacagacttaggttttttgaattcttgtttctatattcttattttggaagtttacagtttggttttatatgcaggggtgttagatgaaggtgtattgttttgcaaatagaaacagtctcaggagacaaataacaatggcatgagaaatttatgaagtttatttttagcagcactttcaggcaaggttttgccatcaatattttcattggtacccaagaagccaacagaggaggccatgttttatgaattgatgtggctacaaatattagctctgacattttttaagtgaaaaatggcagaaaagatacagaagcaaataaatatagagtctctgacagccagcagagatggaaccctttctaacaattatgaccaaaggtatgtgtgtgtgtggtagtttggtttatacttgcttgaatgctgtccttgttctttttttttttttttttttttttggtagttcttgcaccaagtgactgacggcttcctccaaaacaatgtcagcaggacaaggatgtattggcagggtatcttttgaatcagtaaccccatactgatccttgacctaattaacagtctgctataggcatcttgcagtttactgctactgctatcgcaacatcaagaaaatgttgaaacttaagcacccataagaaacttaagggggtgtcccactcaagtcattataaattcagttttattatgctaaaattgtgtgaactatagttcacacaattcaggctggctggaagcctgaatactacattgttttatattataccacatttattggaagagttggtttgcttttaaaggaatccatcactattagtttcatggcgtatttaacatctggtcaggtcagttcaatacttggaaatgttttgatacttgaagtttccagcagattttaacacatgcctttggatgtaagtaaacacctttgtccacaataaataaaatgtaactgagcaaatgaaactgtcacaatgctttgaaaactgtagcatactgaccaaatctatgccatgattttaccttctactgatggaaagaaaagtaactttgattattgcaatctgggcaattcacttatgttatcttatttaactttcatgaaaatcttcatatagtagctatcattattccatttcaaaatgggaacagaagcttaaaaatggaataatttaaagacatacaacctagaagaggcaaagcttctgaatacaacagctatctaactccaaaggtcttggttcttataagaatccattctgttttatgtctgtgattgtaagcttttagcagtttctcttcttctatttctttttttttatattttttattatactttaagttttagggtacatgtgcacaacgtgcaggtttgttacatatgtatacatgtgccatgttggtgtgctgcacccattaactcgtcatttacattaggtatatctcctaatgctatccttcccccctcccccctcccccctccccccaccccacaacaggccctggtgtgtgatgttccccttcctgtgtccaagtgttctcactgttcaattcccacctgtgagtgagaacatgcagtgtttggttttttgtccttgcgatagtttgctgagaatgatggtttccagcttcatccatgtccctacaaaggacatgaactcatcattttttatggctgcataggcctagaaaggtgcagaaactgctttcaattcctgaagggacttgtcaggcaaaataaacatactgaaaatagctttgaccatttctaaatcctttcctggatcagagttggaggttgctcctacattcatacgcattgctgatggattctcatcaatggcccctacttctgggttggctgagatcaataaatcttagcagtttataaatggaagaaatggctttacatatcttgtttcctgaatccctttggatattttaaaagaggtgattaaagtaaatttatgtttctgcagatgcatgtaaagctaattgttttaataacagtataattggcgaaaggaagttatgtgtaataagaaacaaagcgtaccacttccaaaatattcacattagrcatttgttaaatttgcagtgagtttcagcatacacacatacacaacacagaccatatgtgaacattaggaagattgatttgtttaaaaaatccacttctacaccacataagtaatatttcttactgagagtcactgaagtgaggaagaaaaataaccacataaygggaaaagaaaaacattaaatttagttatattgtatatgttttgtgtttattagtttttattaattgtaggcatgcaggtaaaaaaatcgcctcatttgaaaattaataacccagggcacaaactattaattaaggcatatagcaaatgccttttaaaagtattttatactggctgggcatggtggctccgcctgtaatcccagcactttagaaggccgaggcaggcaatcatgaggtcaagagatggagaccatcctggctaacatggtgaaaccccttctctactaaaaatacaaaaactagccgggtgtggtggcgggcacctgtagtcccagctactcgggaggctgaggcaggagaatggcatgaacccgggaggcgcagcttgcagtgagcggagatcgcaccactgcactccatcctgggtgacagagggagactccatctcaaaaaaaaaaaaaagtattttatacttaagtttttctagctgctagtttaagagagatgagaatacattcaaagagcagggaaaggagagtgtctgaacagaggaatttctaaaaatgagtacagtattaacacagttatccttacaatagcctgaggtcaggactattgttttctccacattttggatgaagggactgagacacagagaagttaagtaacttgtataagatagagaagagacagacatgaaactgttataaaaaggaaagagacaggaaaagaggagaggagagagaaagaacaaagcttggatggcaagttaacttaggtcatctacctttgaaattcaagtagtctgtaacttttgccattacatttagaggcaccctctgtgacacggtcatagaatactggttcactcttaggcattcaacaaatgcctattgagtgtcagtcatttattcaacaaacatttactgaatgtctaattaagtagcagatatagtgctagttacttgagctacattgcggagacagggcctctttgaagagcttgtgcttcctctccatgaatgctagattcatgctttccacctaaaccctacttttggaaatcaagaaaagttcacctccttcatgagacttcttggattaaccccatagtctattttcacctagaaatagaaccctgtttttgagtcatgcacgttgccagctgggataaaaggctacatttcctagtcttatacctaggtgaacccatgggtctcaggtcaatgggatgtaaataggatttgtatgagaattctgggacatcctccaagagagcagattcagctggcaggaaaggaatttgctttctgatatggtttggctgtgtccccacccaaatctctacttgaactgtagctcccgtaattgcaggagggacctggcaggaggtaattgaatcatgggggtgggtctttcctgtgctgttctcgtgatagtaaataagtctcaaaagatctgatggttttgcaaaggggagttcccctacacatgctccctctttcctgtcgccatgtaagacatgcctttgctcctccttcgtcttccgccataattgtgaggcctccccagccatgtggaattgtgagtccattaatactcttttctttataaattaccaagtcttgggtatgtcttaattagcagcatgagaatggactaatacactttactacctatcctcctcctggcctggaataacatcactgggtgggtggagtttcagtcactgtcccaggacaggaggtggcctggagaatggaggccagtgcttaggtgtggagtagaagaatataaggggcttgcatccctgatgacctgaaggtcccatttcagccctcaaatagcctctttctggatttatttcatttgagagagaagcagttacatgaagtttgttactttgtttgagagataaatgcagttatattaggtttgttaattttgttttgtttttgttttagttgtatgatgctaaatccaattctaattgatatacctccttcataagataattttataaacccctggaaggaagattgttcattgggctttggcaggcagtgaccttaaaactaggaaaaactgagctttaagggcccatgaaagtccttggcttgtgggtttgctggctctttgctagaattatattttgtttttttctggttcagggtaccgtaacagaaggtgggaagctatatttttcatgaaactgattgcttttctaattaacaatcttgctaataaagcaccactgtacagcagatatagtgtttttaatgtcatggatattgtacctgaaagtaagtgaagaagtgtcagatagtttctgccaatatttgagcagtcttagttctaactgctacaattatgcaaggtatttgtcttagaagagcaatggccatttgagtaagactttccatatggtgttccacagtcactgggagaaaatgggcctttttttttccttagtgaggtgatcctctccttctttctctacaaagtaatgtggagtttggaatgaattctaatgagtgaataataggaagattttgcatactcatttggacaagataaacacaacagcatggttaaaattcttgagatgaaaggctgagtttctgtagcttgaattttagatgataaatatcaagaatctatttgaaggtcagctatcacaaatataatttttctctggcaacacttgggtagctttccttggcaaattttactcaaaaagaagataaattatttctgcctcaactttttcttttacctctcttcttctttctctttattcgattgtttgcctttgaaagtctggctttcattgcatcattagacagaattgtgtgaccattcccaaagagattgacagtgttcatggcaggctgtataggaatctttctgtgtgcaggctggtctacaatttagcataataaagatctggccttatattcataggatctagccaggaaaattagtcttacctcagggtttaaagaaatgagggtgtgtcccagagggatctgtctgtggccagcaggaaatttaattttaaaaactgaagaatatacaatagttcaggcactgaataatttgagcctgcgaaggtgcttctgccacatatattatcatagtgttagtaaggccaggaaggtctgaagtttgtatgagttcacagatattttgaaagactcatgcaggtatttttgatatgattccattttaaaatcacattgtctgtgatgtgtatttatggcattatctaccacatgtgtttgtcctgtagaatttacattacaaaaccttctctgatcaataattgacgatgagtgactgtagtagtttgggaaataacttgctttttactcttttgtcacctgcttcaatatagttcctgctgtttgatgagaattgactgagctggagcctgcaaaagtaactgtagtcaaattagttacattaaagggtcaaaattatagctgcgtggagctaaggtcatggcagaaccaaagagctctgggcacagatcttcctttcatgctcgactgggtccaataatcccccgaggctcaggtctctgattgcatttccagatggtctcctctggtgtaaacaccacccgcgctctgtccaacagcataagctaccctggcagaaagcaaaacagcaggtcagggagccctgggaattacacagtgggtggcacctgttgccaaattttgacctctctcatcccctacgttatatacccatgatattttcaacttacccctttcctttggtatttgcagggcaaactctctagtttcttagaataaagccagcttcatccactccccttcctaatctccatatattcttcaaactggtgcttagatttcctggctatcttgcagatgaattctaatatctactagtcagtagaatgcatttgtgtacttacacacttattattcaacaaatgcctattgagtgtcagtcatttattcaacaaacatttgctgaatgtctaattaagtagcagatacagtgctagttacttgagctacaatgcggagacagggcctctttgaagagcttgtgtttcctctccatgaatgctagtctcatgctttccacgtaaaccctgcttttgggaatcaagaaaagttcacctccttcatgagacttcttggattaacctctctcagatctgagcaggttgtccttctagaattgtcttaatgcatacatttgcagtcccttgtaaccttgttagactgcttctttcatgtagatgttttaaatttttcatagtgtgttgtgtacttgttcaaacgcaaactccccaagagagattcacttctggcaccttcatttttgcttttcatttcccctaatacattgctggacacttaattggtgttcaataaacatggtgaattcatttaacaaaagttattttgcacctaccatgctcacggctacaaatggacagcattatcacagcaactggacattacatagcatgcggaatggcagatggacagaccatatctataatatacttgggtaaaattttgaatgtttattagaatttcatccactgtctcatgtcttatagctacaagttaatttccaaatttgaatatgtccatacttgtttattaaaaagctggggacgatactctgtgagggtttctaaggagcatttgataaggtgtaaaaccactatagtcttggattcttctcattgctgagcagaatgggatgtgtcctgcagcaggttgagtggctctatgtggttttatgaccatacgtaggaacctgcttcttctcttgaaatggctgttttgttttatggagattggctagactggcaggtgacaaggcaagaggtgggctggccacgagagccagctgagcagtgcgagttggtgtgattcagccatttgtcaccaccatattctgccatagatagatattttctattcgagaaagtggatcaamtttcactgtacaccactttctcactakgstagaaatacatgaatggtggggcatagttcactccaaatmtgatccatctaaacttttctttctggtgagttgatctgttttgagattttacactttacataaaaatagtatagcagccactctttgccagtcacaaaccacctttagctgagagtattatcatatcaattgtttcaaggaaatgacaaatgagtagttaccaaaaaaagaatgaatgaatgaataaataaataaacacaagggaatgagttgttactagacagagaagaaaaagattgcttggcatgtcccaatttggttattgaaaatttttatttttgatgcagtgctcttcttttttccttccttccttccttccttccttccttccttccttccttccttccttccttccttccctccttccctccttccctccttccctccttctttccttctgtaacttaacacctatttgattttttgaaaacattttttattagatgcttagatcagctgggacaacttaaattgcaagctaccagaaatatcatattaaactaaccagtgaagatgacagtttggatcatggaggtagggttgatttcagctgaggtttgctttagcagttgcaacactgtgatcaagatctgccttctctccctccatttcaatctagtttcctggccttggctctattctcagcaggtcttgtcttcctgttcctaaattggccatgagcatctcattccttattctaatccaacagggattatacctgttggtatacctactcctcctacttcctcccttagtctgtgggggaaaaaaaaaagaaagaaaagaaaagaacttctgagcttcaatgtgattaggtcatatgcctatcactgaactgatccctgtggatagtgatgggattttgctgataagtctcagtctcagcccccttccccaataccaccatccactttaaaggttttggtttaaataaatttcccttgaaaaattttttgggggggattggatgcctaaatgacaaatttggtgtcctttcccaggaaaagggaaattttttccaggccgtcaaaaactaattaaatgtcctctctaaggtttcattactaagatagcacacagtttgctgctgctcctcctctttcttcttttttttttttgagacagagtctcactctatcacccaggctggagtgcagtggcatgatcttggcttactgcaacatccgcctcctgagttcaagtgattctcctgcctcaccctcctgagcagctggtattacaggcacacaccaccatgcccggctaattttttttgtttttagtaaagagggggtttcaccatgttggccaggctggtcttcaacttttggcctcaagtgatctgcccccgttggcctcccaaagtgctgggattacaaatgtgagccaccgtgcccagcccacattcttcttaaagggtttgagattttttttggaaattacagggcatatagctttgtgctttattcaaaatgtcatagagcttcaaacagttcttcctgagacagatgtaaaacaattttaagatttctgagaagtaatttatatatccttataatagtcataccatgtgaaacctggcctgctaataataagaagaaacatctggaactagtgacagggtcaattttgggtattctctctctatggagaggactagttcttctgagattgatgttggcagtttggaatcttttcccagtgggaaggaagacttagaagaggatagttgatattgcctctcctcccacaagcaagtttcatctttatcacagttccctatggctatgccattttgagatttgtatacaaaccctgtacattagtgagggactcactcagagaccacctagactccaatcagtatccagcctttaggagatggcttgacctgggcagcttccccagtgatggagtttacaaaggatgacaatgaccatattttaaatctgttgttactctcttgcaagactcctctttttctcttgcttgctcttcaccttagcacgtctgtacacacctgcctttggtataacttgaaagacagccctaattgaggcattcatctcatacaatccaagagtcaggaacacagcttttgtaaggaatgcattgtggattcttcagatgtgatttaatgaatatccaactgtacttggggactaaaaagagcatttttaaatgagattttgctctgaattggaaagtaagttgaggtgggaaataagccagccattaaatgctctagttttttttttttttttttcttgagatggggtctcagtctcactctgttgcccaggctggagtgcagcagcatgatcatggctcactgcaacctccaactccccatgctcaggtgatcctcccacgtcagcctcccgagtagctggaactacaggcatgtgccactatgcccagtaaatttttcataatttgtagagacagagtttcgccatgttgtccaggctggtctcaaactcctggactcaagcagtctgcccaccaaagcctcccaaagtgctgggattacaggcatgagccatcgtgcccaaccatagattttttttttcataatggcagagaatggctgcaatttagggtctttcttargttcttcctcatccatttcttgcagaaaatttagtactttgtatttctttcaataatttcaacaattttatcctgacttttcccagagcaaaaattaggatggggatgttagagcttcctttgagcaggctatcatcgcaatgaaatcttgaccttgccccttgtagttgcctattgctttataaaacttgttattgaaattgcaaacagtccaaattatatagtagtttctaatgtactttatcagggtgtcagtttttcttttgcaagtgttttgaggagatcagattgttaatgaacattctttgagaatctgaacctgagaactgtctctttaggatgaagttaccaaggacagatgcaaaatttgcaaagatacggtgttccagcctcctccaacaaaggttaacaaccacccgagaaccccagtgccacttacctaccacctcttacctttggaagcagattgcccagtgacggataagtgtggaaactgttcaaagattgggaaagaaaattgttagaaaaggcacatagagaagagtgggattgggggcaaaaggagaaggaggatagtcttctgtgtttttttgattggttaacttaaaatctcagctatttgtttacacaaaggctatgttgatgtccatattcaacagatacaggtatttggctcagaaaagcacatggttcccagaccatttgccaaatgtcctatccttgttcagctttggttattatgaatatccttctggaagcaactgacacctaacatgtctgaatcctctggacctgtagagttcttaccccggagtgattacaatttctgaaaagaacatccctgcaaaattagctttcaaaatacgtgcagataagcccatagaactgggaattcctccagggaattatatcctaagtagcctactacaatgcttgattccttgggcaccagtggttgctcaataggttttttaataataaaaactagaaggaaagaactattgttagctaaagttaccatgtaataattggcttgggtatgtccctgcttgtttgaattgcttaatgtctgttctttgcacagcagaaactcttgtgccacttcctgattagtcatcttggtcttctgtttcctgagctgtgctccatgatctcgtgtaaatatatacaatttgtgataaaatcatcttgctcattccatagcaggtataagtgggttaattctattgggaaacaagctcaaattttaacagaagtttttctttgcttcaagggaacgagtttcccaacagtgggaattttaagcattttggcaaatcaataggggagatattttcaaaccagcatgattctatttggctcaggtaaaagtaagcccttctggactggcttgcaggtgggttcttgagtcttggcttatttaaaaagctgctgcctgttcttaataaatgccatgatatgaggcaccatgaacaagctggatttaaacctgccctatcaataattttactcataagttcttggcaagtatgtttgttgtctgctgtctgcctgtcaaggttgtcagttagctaagcatcagccaaccacatgatgctgagtccccatgattaatctgacttggtaatactgttcatctatgtaaagaattggaaaaagtagatctcccttcatggcgttgtgcgcgcacgcgcgcacacacacacacacacacacacacgcacaccaatttgtttaaaataaaaaaagattagacgaaagcataaaatcagccctctggtctgaagcaattaatctgtagaagatgctacatatgctgggtgtagtggctaatgcctgtaatctcagcagtttgggaagctgaggtggcaggatcacttgagctcaggagttcaagaccagcctgggcatcaacacaagaccttgtctctactaaaataattttctaagaatagctggatatggtggtgtatgcctgcagtccctgctgctctggaggctgaggtgagaggattgcttgagcccaggagactgaagcttcagtaggctatgatcacatcactacactccagtctgtgtaacaraatgagatcctgtctcaaaaaatttaaaaaataaaatgaaaaagaagatgctacgtacattatacacatataaattagtaaccaaatggtttaacaacctcagtgattgtgttgttctgtagtttgatgacttttatcttgctccttctcattgccattgattgtaccaggttatttcctggagcatgttgtatatcaaggtttatgcaactgtacatttaacctttcagtgcctagctttccccttttcctatagaatcacaagaatttgaaggcaacacaatatgttttctatcttatagtctgaagttaatgcatattaatggcatgctgctattactagttaatactgatgccatgaggattagataatcattgtaaaaaatgtttaatagagcattttttacaatacttagtggatgccagtatactaaatcctttatatatgcttaggtcttttatttcccacaaatctgtgaactaggaattatgaacgcattttacaaaacaggactcgttgcataacttgccaagtcacacagctaatgaacaggagagtcagaacttgaactcagggttgcctgcctctaaagtcctccactaattctcattcattctgtaaaaatagaacatggcctctagaatctcgtcatttagaaaagaacagccttttggagattggttagctggtttgagaacatgtagtttgtttatctgtgtctttgactagtaataacgttcagcctcattaaatctagtaagctaaaaggaagcaggaaatggctgtagtatagacgcttgatatttcagcgatgataatgatggataataatgtgatttcacagcttgggttatcagacccaggtgagtggataagtggattcagattcattaaaatcaccgggcctagtttgtggccttcctttcacaaaccccttaggctgcatattaccctttaatagcatatttttcccattatagttgcccttgctattcatttcaaccacattacaagtataaacatgtacaagggagaggacagatgtccttcccttctgtattaactctcttgttgtatgaaataatgttatgtattaaattattgtctcagtttatagagtctgctagactgtgctgttcagtagaactttttgggatgatggaaatgttcaatgtctgtactgttcactaaggtagcaactagttacctgtgttagttgagcgagcacttgagatatggatgatgaaactaaagaacagatgtttaagtttatttaacccatctaaatttaaatgtaaatacccacatggctggtggctaccttattggacagcagagatttagaatagtaaagctgaatggaccttagagtacatgtaaggcaacacattctttttattttagaggaatgtaggactcagagcatgaaaaggagtaaaaccaagcctaggatcctggtctcttgacttctagttcataatttcttccactaaacttaaaattgttaaaaatgttactttgaactttagtatttgaagattatcgtggtaagactttgcttatatttacaaaagcattgtaacagaaaataaattttgaattacaactgtgactttatcatatttattttacattttatgattgctaaataggtcatatattgacgtctttacatatttgttgggagcaaaagagttgaaagtaaagttttcttcccatctatgttatttagccattgattcccctctccaaagggatcagtaatagtttctttgtgtatctttttaaacattcagatatattaagtatttaaaactgtgtattgttctctcatctttttaaacaactggtaggatatgtacactacacattcatatttttgcattaaacttatatgtggagatcttttgatgtgagtacacaaaaagggtactttaaaacagatacataagcttctattgcacgtaccaactgtagtttaatgcatccctatcgatgaatatttacttcctttccaaagttttctcttaaaagtaatgctgtagagaataactttggacacataactttcatgtgtgcaaatacattataagataattcctagaaatgaatgcactaggtcaaatagtatatacacattttaaattttgataaatattataaattgctctccatagagtcacagcattttatattctcactgacaatctgtaatctctatgccttcatcaacctagtgtgttaccaaactgatcaattcataccattctgacaggtggaataaaatctcagtgtagtttaaatgtacatttttaaaaattgtgaatgagctgggcatcttacatatatgtaagggccatttgtattttatttattgtgaaatatgtttgtatgctttgtccatttccatcagtttttaaaattgacttagaggagcttttatatataagacaaaatatgacatatatggtaaacaaaatgcaaacattttcttcagttgtttgcctttttcactttgtttttcatggtgtttgctatggagaaaatataaatttttacataaacagatatgccaatctttccttttatagcttctggttttttgagtcaaaaattgagagaccttcctcattctgagagtataaaatagtaattatttttaattttaattaatttatttttattgacacctaataattttgcatgtttatggtttaccatgtgatgtcctaatacatgtacatattgtgaaatratcaaatcatggtaattagcatatcaatcaccttaaacatttatcattcctttgttgtgagaacatccaaaattctctcttctggctgcttgttggcagtagtcaccttactgttcaacagagtactagaacttattcctttctatgtaactatatctgctgaccaacctcttcccatctcccactccctcctattctccctagtctctggtaactactgtcctactttcaacttctatgagatcagtttttctagattctacatgagtgagatcatgttgtatttttctttccatgactggtttatttcatttatcataatgtcctctagcctcattcacattgttgcaaatggcaggattttatcctttttgtggctgaatagtattccattgtgtatatgtactgtgttttctttatccattcatcccctgatggacacttaggtggattctgtatttcactattgaaaatactgctgcaataacatgagcrtgcagatgtctcttctatatactgatttcctttcctttggatatatacccagtaatgggattgctggttcatatatttttaacattttgaggagcttccatactgttttccacaatggtagtactgatttacattcccacgagcagtgtataggagttccctttcctttacatcctcgccagcataataacgattttaatatatttggaatttattctaaagatgtaaagtatgactcagacatcatttattaagcaatccatctttttcccagttatttgagatcccacctttatcacataaaaattttaatatatctttgagtcaacatctcactttgtagtctcttccatggaatctgcctattcttgcctgtaccacctgttttaattattttagattttatagtgtactttaatatattgaagaactattctctcattgctgcatttcttttttaggctgttcttcaccactgttacttgtttatattttgtatgaaatttagattcagcttgtctatttcaaaaacaatttctgttggtatttttagtaggatcatattaaagttcaagattgatttagagactttcgaaaagcattgaatctttctatctgggaacatgatatgcctttccatttgtttaagcattcttttatgttttctgtcagtgtttaatggttttcctccaataacttttaccatctataatttagcttattcctacattgttcttttttatgtcttcaaaatgggccttttgcatgtatgcatcaaagctattgacttgtattgattaacttgggcctcttctaaattttttcactttagaaaaaaaatattttagcaattggttattttatgttttccaaagacctaaatataaatgtacaggtgatgaactgcactttttcctttgaaatttgtatgcctttactttctttctctgatataattgtattcactatttcctccagaactagttaaactagagtagaaatttttggcatttttttggttcctaatcaaagttggaaaaacagacttttcccttgaaatgtagtgctggcatttaggttgagatagaaatatttcattatatgtttttaatcaagaatggatttgaatttcatcaaatactgtttaaacatctatgataataatttgaggtctccataggtttattaatatcataaatgaactattttagccttataactttaaaagccttattcttttaaagttttattcattctcctcccattcttgttcactattcgttgcccattcttgttctatataaaaaccccagtggtccctgctgtgaattcaatgacatcttatttcttttccttaagtcagagcaaatgtgcacatcagaagagcaaagtgtcaagtaatgatagctggaaattgagccacaaataaacagaaaatattttcttcattgttatttgtgtgtatgcttgtgcttctttttttcaagggagtagaccactgttccacatgttccacagttgttttatggtggaatgctctagttatggaaaaggagaatggagtctagccgtataaagttactaaacctgcttggatatgagtcaagggtatcctttttgtgcccaaactagaaaacctttccccttctcatatttttgagcaaggtgttttatgttgcaaagtagcccactgtctcttttcaactgcataagcccaaataacattttatattccagtcagtcacaaaatgaaaacaggaaacgtctttgaagcaaggcaaaaatgtcagagtgtctaaaacatagaagtacttggtgaaacactttcagcgtcttagctctgcctctggctagtcatttccactcgctgggctcagtcaggtctttcattagtgaaacagaggtggctgagcacttcctgtgaaatcgcagggacaggattgtggccctctggagagggggccaggaggaaaaggaaccagacagctggttttcgggagccaccagatgggagcaaatttccaaggctgctgagaagaatggtctagaataacagaattgttttgtgaaggagccttcctaaaccaaatgttctgagcgtccccgcaagcagagcaaatgagcacatactgtgttcatggggaaaaggacaaatgactgtacaaatggagtaacaaacaatttacgaaaatgtatgtggcctaaatttagtatcaaggtgatgggcaaaatgacttacaccaatttgtgacggtcctgttgcaaattcaatgacaaagccagccagtctacctagtccatagtatccagcagatatatcagtggagatggcccgagtgcaggctgcttaaataagataaatcatctgtgaagaaggaaaaggtcaaatgtgctattctctgtctttttttttttttttttggtctgaattaaatggaaaccattacaatttcttccaagaaaataaaaatcagcacctacaataatgctgtctccttctgaccctgccaagtctgactgcattccacctggaccctgcctttgtctctcatgtttttatccaagaataagtaggctaccttgtagtaaacaggaaatcttactcttacctcgcactagttagttatgcgtggtacttgatccataatcttctgcccccatgtcatagaagataggtttttccaactctcagatggaaaatcactagtgcactacacacacacgcactcatgctcagaaatattttcacagatccatttttctctgtgtgacggaggttacataattatatcagtggatgtcctgcagtccagctggtatatgtagagcaactgcatgtttgtatcactctgttaggtgcagtgtaggacacaaataaagagagagaagggagagaacactgccgagtcattaggggcatgctttcagttcctatacagccaagtttttttttaggcttggcctatgcttttttcttagtttgggtttagtatgtattcattcattcatattgccatgtgtgttcaacaaatattttgggatgcctgctctgtgccagacattgtgctaggttagagggatgcaaagacaaattagaactccttttctcaaggagacttctggttattgtatttgtgataaagttttaaagttactatactttgcctgcctagaatgtagttggatctcaaaagaattactgagggttggaggtttgagtggcagaagagcaatgattgatgaaacagagttttgaaagatgagtggcctatttgtcatggaggtaggaatggggggtgggtgggcttctggagagacacagcagaagtgtagagaagaccatggtacttgtagggaacttctgtggtttagagtgagatggatcttgcaagagctcaggctggagactgagaaaatgctaagtcatggggggtcttacacaacattctagagaatttagactttcccctgtagacactgaggggccgtgaacagcatttgtacctctgcaagatttttctggcagagacatggaaaatggtttagaaggtgaagataaggagctcaattagtgggctatttaaagtgtgcaatccacagataaaaggcaaaaacaaaacctgaatcagaagagtataccagaaaagggtgccagcctattatatatggcaatttatgatttatttaacattgaaggaaaaaacaggccttcaaaaataataaaataagaaggtgctagctatttacccctataacttcaggtacaagaagaatatttttattttactgagctcctcaactgatttaaaaaattaatactcataccagattgtaaataattcaaggaatcatagccccttccttactttttttacatttgtaagatttaaagagtcatacacccagataacatcaggctgcagagttttagagaccaactccttcagtgatttttcaagatgagaatgttctccatgttctcctgcagaagcttctctgggagccccaatatgtacaagagacagaggtagaccactggctgtgccttccctcctcctcctccccattctactcagctctgaattgcagttgcatagtttgcaaacttaatgttgtcaaaccttgttattccataatgggggcatagttgtgcaaactggaagtgattgatttacccagggacagaagacttggttaatagtagaaaaggatccctaggttccctaattgttggacaattgctcttagcagttttggttaacctggtttttatctggcttctcagtagagatgattctttcataagatcacctgcacacaaccagctactcatatatttgcttatatgtgtcatatctgatttatgtacattttctgtagacaagcttgttttaggtcatgtacttattacttactaagtgtttgttttctccatacttggggatctaaattagtaagcaacaaactgacttggtgggttcaactcaataatatccaatgaagccatttcttcccattcctaaatcctaatttagctgtgggaagtttggatcaatggaaattaaactccatatatgccaacactatgggttgataacctcttccaagaatcattgcctgaccatcatgttccttctacctgaccactccttcctgcacttttatcacatattactctaagggatcatgtctaactttttgtcttcctcaattagactgagtatttcttgaggccaggaaatgcatcattttatccatagcatctaactcaatatctaatgtgtaataaactcttaatagaaatttacttaataactagatagatagtttaagatatgcccttgatgtagtcaagaagacaaaatgtatgggtacatttccttcttgtgtctggttcctctttctgcattgtcagggcaagttttaccctctaatttcttgtggaccagcagctgtcttaattgacagtcccaccaaaccctggatttcataggatgtcccagacaatgagaaatggcttgaagatagaaaattgtctgtgtcttaaaataatcttctataaattatgcgtattaacacagatatgtagcaaactataaaggttattttgctctgaagaggaattcagaattagaacttggatgtagcaggacacctctgttctcattgccataaagaaaaaaaaaacaccttttatattgaatttcagtgaaccttgcagccagcatctgtcccattaattttcatatacgagaacaatgtggcatgattactcaccagcaacagaagtagcagttttataaatcttatgttgtagtggctggaagggacagggttgtgctctcattgtttccatattctttgtgaaattcacctttgcagggggtggtttgctctttctcttccagatgtgcacagaaatatgccatgtcactaaacgtcatgtggcttaacatttctccaattttcagctaatctactgagaaagtagtaattttttctgactagtggtggcctacttctcctataaggctgtcttttacaatgagggaagttggcctcactttatttataaaggtgcacctaaggctggtgctttctggttctggggctgcttaatccaccctctgtttcatttgatcctatagagtttgggggagggctgaacaacagtttcattgacgtgattcagattcaatttgctaagaacctgattgtgtttatgacattaataagaaacactttaagccttttaatacgaatccccagtcactctgcttcttccctttctactgatgatactttgtgatctacatagtttaaactttcattacacaaggaaacttctactaccacttgatgtgtgtgtgaataggctatggggaaaaaaaggttcatttttgtttgagttttttacttttcataggtcattgtcaatgtggtaagtatgctctttagtgggatgatccaacactagggcttcatattcaatatcatttacagaaatagtaaatgtcaataacagctaatgttcattgagtgctaatcttccaggtactgttcaaagagttttacctattatcaactcaattctcccaacagccatatgatgttgttactgttattatagataaagccacttaggcacaaagagattaagcaactagttcattgttacagagttggaaatggaaagccaggtcctaacccaaatgctstgttgcgcacttctctgctgtctgcaggtgggatgagaggtgggtgctgagctgcctcctgtggtgctgttttgaaacctgcccatcccaaagctaagggagtatcgctgtgctaaagggttcagtcagcagccttgccagttcggaatcccctagaaccaccctccatgcatgtcatgggcagctctctgagatttctggtgcctcttactggcttgttaagttggcagatttttctccccatttgcttccttcattataaaattcccatttccattttgcctctaggtagaagctcatggaactcaaatgggaaatgatgatggtggattttcctgctgaaaagatgtacctcaaaaggaaaaaatagtgtatttaacatggagaaatgaaatcctccgaagggagcttcatgaactaaattacccagaatggccttactgtctgttgtcagcatttttctgctgcccctttgagcatcagtttactcactcatgtgtgggtcagctctactcatctgtgaaggtagataataaaacctacccccaaaaggttgcagtgaagattaagtgatgtcatatttttaaaaatgcctctgtaggctctggtacattccaatggcttggtgaatttttttttttccttttccttttccaaagggaattaaaaaaaaatgagagtgagttttgaggatcctagagcaagtaatcccagcactttgggaggatcatgaggtcagaagttcaagaccagcctggccaacatggtgaaaccacatctctactaacaatacaaaaattagctggatgtggtggcgggtgcctgtagtcccagctacttgggaggctgaggcaggagaatcattcaaacccgggaggcggaggttgcagtgagctgagatcacgccattgcactccagcctgggcgacagggtgagactccgtctcaaataaataaataaataaataaataaataaataaataaaacagcaaagcttctatgaattctccttttagcccttcatataagtctattcttcaggagccagtttatattttatggttagatacacatattaaattattggtatgtcagatatgattctattagtagtctccagggttcatagcttgttagggaaaatcctcctaaaaagaagttctttttgtctattcttcattaacttatttcacttgtaaagcattaaaatgggtcctctttacatattatgttgttttctaagggacaaatactagtggttattattacagttctttttttcatgtttggtacttcagtggttgattaactgtttcttaatcctgaaatgtggaggaggtttttgcaagtggttgtagcctggttttgaatgaaggtgaaaatgctctttttgttagctctagatcagcagaggtgaataagcatcatgaatttaggagactggcgtttttttttacataaaagttgctttgttgctaattagtagattagaattcctttaattgcattctgaccaaagacttttgggtgttcaggagggcaagttagcatgtgttgcatttgaatttatacatttgagacacattttcttactgaagctgatattcatgaagcagaaaagataaaaacttgtacatacctttttatttcttgattttaatgttgaagttctattctcagaatggattttataggcaacaatatgcacttaaatttatgatctgtttacgagacctcactgtattttgacagaggtcaaaataagggaaatcaatcttggttctcattccaaagagttttttttcctgatatcttaaaaaggctttattacattatgttgatatccatggcagagagttccaaagacatccccatgaaagggctataaatgtgaggtttgaaaccaaggcaagtcaagcagggtaagcaatcttttcacccaaggttttaaaataactgctgataagaccttctcacagattttcattcatttcttcctagttataggcaggaaattctgaaagcaggtgaattctaaaattaccttataacttgatttcagaatatagttacacaaagtgagaataactcgatgaggatgctgtttggatcttgagtactgtaagtcctgtggtttaattgacgagttgatggatttcttttatgcctaaattcaggctgaaaggcctaaaggccacacgaggcagtttatcacgagcgctattctccgtttttatattmtggttcattaccagccccttcctcagtacttctatttatataatgttgttctggtcaaggtttatactaaatctcttttaacttcaacatccaacaaatatttttaaggactaatgtgtgcaaaacattatgctaggtgtttcctaaggcttcaaataacttggatgccagttttggactgtaagtgctcacaggataatagaaaaatcttgtttgcaaataactggaacataatgtacaatggaatgtgtcataaggggagtgcacacaatgctgtaggaattccaatgaaattcaccctcatctttcattgtattccctgttatttacctctccttaaaagaaagaactataagaactctacatcttttagtggcgatttcctagatagaaaaataatgaatattaaacatgatgtgttaggattggtgaggctgaagaaattctatgcattttgtcatttagtgaatatgtattgactgcctgcctattcagtgtcaagcactataggtggtaatgtatcaagaggttcatgaactaataataaaggggcacctctgtatttcacaaatatttgctgaatgaatgaactcattatattttattctcctatgtgattcctagataagttctgctacctaaaggaaagcacttatggaatccaaggtttggaaagggcttgaaagatcacattaataggtttcccttttatttgcctttttgaatctcaatatggaataactttgacttatccatactaaattgcatctcattggtgttacacaatctttccagtttttcaagattatttttaacttatgccaacaacatattaaatatcctttccatctatgggacccattccattttctaagtttacctaagactttaaaagacattaagccatcagagccaaaaacagagtttctctacttccatgttgatattctccttaatctacacttccattcattcaataaatatttactttcagggtgttcggatgagctatgggttacatagtgatgaattcagcagacatagcttctgccctcatgaagcttacagcctacaactacagaggatggggctgttgaagcagctaaaaaaccctaccttttctactattgagcaataaaagaaatgtttttcttgaatttctgagatcatttcttgccagtctttgctcatgtcactacctggaataaactcccttttatcatattgggttatcaacatcttatacattcacaaaagaccacataaatgttaccagctgcaaaaatcttattcatgtctgtgaaatccattaacatgtggcaccacttgagttgggctcatcacttgctgatttctgctgtcattatttgtgaatgtctaatttcactgtaagctcatactgtcctttcaaacatgaatgaggcctttaacattgttgtatcaatccataacattgaacataataccctgtttgaggaggcatgactatagaccctttctgtccaataataaagatgttggtaagagtaaataaaaggtctcatttcttgataaactggttagaatcaaggaggtctgagcatgacactagggttcctaaatactttcattctagacacataaaacctctagaagattaaattcagacaattttaaactttagatacacattacaacacaaagaaatgcactattataaattttaatgggggaaggccggtaattcaggaaactgtcagatctgaataatgaaataccagatagttcttatctatttacatactctgtgatttctaacactctgaacaataatatttcagggttctaaatattggttagatttttaaagttttcgaaattatataactagatgactgctctcaaaattaggccggtattttggattacacagagtgcctaaaagtgcatttttcctcctgaaggggaaagccatgtgcctagccaatattttcattccctaaggatccatggaattatgatagcttaccctcatcagtcacccaggctcccattggtgtgaattgggcaatgctgtttacatagcaaatacacttccttttatacaagggtccacaacccctgggccatggaccagtatcagttcacggtgttaggaactgggtcacgcagcaggaggcgagctgcaggtgagtgagcaaagcttcttctgtacctacagccactctccattacttgcatcaccatctgagccctgcttcctgtcagatcagcagcagcagcaaattctcatagaagcatgaaccctattatgaactgcacatgcaagggatctaggttgcacattccttatgagaatctaattgctgatgatctgtcactgtctcccatcacccccagatgggaccaactagttgcaggaaaacaagctcagggctcccactgattctacattacggtgagttgtacaatcacttcattatatatcacaatgtaataataatataattgaagtgcataatatacataatgcacttaaatcatctccaaaccatcccccactgccaccctggagcatggaaaaattatcttccacgaaacagatccctatgccaaaaagttggggattgcagctttaatagactcagaggcatagtcttagagtgtaacaaatgcacaaaccttttcttttaaaacagactccagagggattgaagagagggaaccagtgataatctatatgcccatttcatggcagacatgctgctgtgtgctttccatgcattatatcattcakccaacaggcatctaaagaatatagagtcaagaacagttaagccattgccacaagatcacctagctagtaaatggctcaaactcagtgactcaaacccaggatttccaaccttaaataaggctctcactcccacaccgcacagctgcatatctgagtgtttatcagtgaattacattgatgtaaattcatttatgaaaatgtcaagatatcgtgagcactagtgcttttaggagagaatatttaactcatttcagacaacatatattaacttcatcaaaagtttgcctgttataaacctgtgactcactcttggtcaccatgatggtgcaacagctgtccactggacaaatactaaataatattttatccttgccccctatttcttatgagaaagccacaatgaacttccttttgtctctcatttcacccttaaagggacaaatagcattgcattatccttgaaagggtcttctgctgacccatctttgacgcttccatcacagggtgacgatgggatgtttgctgtatcacacttccctgtgctttcatgaatgtgttactggtgatgaagaatgccaattctttgtttagtagcagtttgctgggtctccctgaaaataatgtgtcagttaggctacctataaatctgagtcagtaatgtacttctctaaggtatatttatgttttgaatttgtctctgagcaatctgttggggggaaattttgctttaatatgttttataaaaaggtgagaaagtaataaagtgtaatgaagataagataaattttctaataaaataaaatatagaagtgttcaaaatttttgctttccccatatgactttgttttttccccaaatgttaccctcataacaggtgggttctgtctcttgatgggtatcaacacagtgaccacaaccgaggaggatttagcaagggaatcttactacttgtaacaaataagggaaacaccaggagcaattcccaaagcagtatctctccaagctggggggcagtcagattttataagtgtagggtaataaggtgtgatctgattggattctgcaatgaggtgttgtcagaaggcataatctgactggattttgccatgggatgatggcagagctcaatctgtttggatcctggatcctgccattgttgtgtctgcttttaattcagtccctactccttggtcagagcacttaggttccccctgtggttgcactcttggttcttccgcacatggtcaggttatgtgacctgagggtccatggcaactgaaaaacaagaggaactttgttacataaaaaattgaaccagatttgcctggcatggctacacaaatggatgtctctgttcagccttatttatccacagtttttcctcctgctgatccctttttcttgcctgtcctccctgcctgctcacttgctttctggcctctcttgcctctcttcttagccagagctgtatagggatttagttcagtgtttcctccttcattgtcattggacaatattcactcatcagctccaggtcacctccctgtcctcacctgtgaccagtcttccttccaggttcattgccattttcaaagtgagtctgcactctctcaccacccgtttgcttatcacccactctctatgtgattacttgtgatttgacatctgcccatgctactacaatgaaatggctttctcagagactatcatatgtctctattgacaaaaccggattagtgctgcttattttctgcagtatttactgttgttggacaccgcttccttcaactttctcctctcttggttccagggcactatactaactttggtggccatatactcagtgcctccttatacatgagtggaagtaaggggttcagaatgaaatgattcagtcagtctcataaagagataggacatctgtggagattaaagttctcagagttagtagtctcattgctttattccacatgatgttgacaaagaagtagaaagggaaagccaaatccttcaatctatattgctaattaaaaaatgattttcttttcttctttttagtaaatgtttgatggtgtcttgggagtagccttagtagcaaaaggaaatatttatgcatgtctttgggaaaatgtctttccattttctgtggttattgtatctgtaaaaattggacaccatttcttaaaaggattatgtgaaaattttatgatgcctggttggtgaaaggcagagtgtcctgaaatatctaaaatgtagaatcatattctttctattgttttgatataattagaagtgtcgattttaaaattacactgaaaggcattttatttttaacattgttttattaggtgagtgcaaaagtaattgcagtttttgcattgttgaaatttgccatttgatatgggaatacattcttatttttaattaattaatttattattattatactttaagttttagggtacatgtgcacaatgttcaggttagttacatatgtatacatgtgccatgctggtgcgctgcacccactaactcgtcatctagcattaggtatatctcccaatgccatccctcccccctccccccaccccacaacagtccccagagtgtgatgttccccttcctgtgtccatgtgttctcattgttcaattcccacctatgagtgagaatatgcagtgtctggttttttgttcttgcgatagtttactgagaatgatgatttccaatttcatccatgtccctacaaaggacatgaactcatccttttttatggctgcatagtattccatggtgtatatgtgccacattttcttaatccagtctatcattgttggacatttgggttggttccaagtctttgctattgtgaatagtgccgcaataaacatacgtgtgcatgtgtctttatagcagcatgatttacagtcctttgggtatatacccagtaatgggatggctgggtcaaatggtatttctagttctagatccctgaggaatcgccacaccaacttccacaatggttgaactagtttacagtcccaccaacagtgtaaaattgttcctatttctccacatcctctccagcacctgttgtttcctgactttttaatgattgccattctaactggtgtgagatggtatctcattgtggttttgatttgcatttctctgatggccagtgatggtgagcattttttcatgtgttttttggctgcataaatgtcttcttttgagaagtgtctgttcacgtcctacgcccacttcttgatggggttgtttgtttttttcttgtaaatttgtttgagttcattgtagattctggatattagccctatgtcagatgagtaggttgcaaaaattttctcccattttgtaggttgcctgttcactctgatggtagtttcttttgctgtgcagaagctctttagtttaattagatcccatttgtcaattttggcttttgttgccattgcttttggtgttttagacatgaagtccttgcccatgcctatgtcctgaatggtaatgcctaggttttcttctagggttttcatggctttaggtctaacatttaagtctttaatccatcttggattgatttttgtataaggtgtaaggaagggatccagtttcagctttctacatatggctagccagttttcccagcaccatttattaaatagagaatcctttccccattgcttgtttttcctcaggtttgtcaaagatcagatagttgtagatatgtggcgttatttctgagggctctgttctgttccattgatctatatctctgttttggtaccagtaccatgctgttttggttactgtagccttgtagtatagtttgaagtcaggtagtgtgatgcctccagctttgttcttttggctcaggattgacttggcgatgcgggctcttttttggttccatatgaactttaaagtagtttttttcaattctgtgaagaaagtcattgatagcttgatggggatgtcattgaatctgtacattaccttaggcagtaaggtcattttcacgatattgattcttcctacccatgagcatggaatgttcttccatttgtttgtatcctcttttatttccttgagcagtggtttgtagttctccttgaataggtccttcacatcccttgtaagttggattcctaggtattttattctctttgaagcaattgtgaatgggagttcactcatgatttggctctctgtttgtctgttattggtgtataagaatgcttgtgatttttgtacattgattttgtatcctgagactttgctgaagttgcttatcagcttaaggagattttgggctgagacgatggggttttctagatatacaatcatgtcatctgcaaacagggacaatttgacttcctcttttcctaattgaataccctttatttccttctcctgcctaattgccctggccagaacttccaacactatgttgaatagtagtggtgagagagggcatccctgtcttgtgccagttttcaaagggaatgcttccagtttttgcccattcagtatgatattggctgtgggtttgtcatagatagctcttattattttgaaatatgtcccatcgatacctaatttgttgagagtttttagcatgaagagttgttgaattttgtcaaaggccttttctgcatctattgagataatcatgtggtatttgtctttggctctgtttttatgctggattacatttattgatttgcgtgtattgaaccagccttgcatcccagggatgaagcccacttgatcatggtggataagctttttgatgtgctgctggatttggtttgccagtattttattgaggatttttgcatcaatgttcatcaaggatattggtctaaaattctctttttttgttgtgtctctgcccggctttggtatcaggatgatgctggcctcataaaatgagttagagaggattccctctttttctattgattggaatagtttcagaaggaatggtaccagttcctccttgtacctctggtagaattcggctgtgaatccatctggtcctggactctttttggttggtaagctattgattactgccacaatttcagatcctgttattggtctactcagagattcaacttcttcctggtttagtcttgggagagtgtatgtgtccagaaatttatccatttcttctagatttctagtttatttgcgtagaggtgtttgtagtattctctgatggtagtttgtatttctgtgggatcggtggtgatatcccctttatcattttttattgtgtctatttgattcttctctctttttttctttattagtcttgctagcggtctatcaattttgttgatcctttcaaaaaaccagctcctggattcattaattttttgaagggttttttgtgtctctatttccttcagttcttctctgatcttagttatttcttgccttctgctagcttttgaatgtgtttgctcttgcttttctagttcctttaattgtgatgttagggtgttaattttggatctttcctcctttctcttgtgggcatttagtgctataaatttccctctacacactgctttgaatgcatcccagagattctggtatgttgtgtctttgttctcgttggtttcaaagaacatctttatttctgccttcgtttcgttatgtacccagtagtcattcaggagcaggttgttcagtttccatgtagctgagcggttttgagtgagattcttaatcctgagttctagtttgattgcactgtgatctgagagatagtttgttataatttctgttcttttacatttgctgaggagagctttacctccaagtatgtggtcaattttggaataggtgtggtgtggtgctgaaaaaaatgtatattctgttgatttggggtggagagttctgtagatgtctattaggtctgcttggtgcagagctgagttcaattcctgggtatccttgttgactttctgtctcgttgatctgtctaatgttaacagtggggtgttaaagtctcccattaacaatgtgtgggagtctaagtctctttgtaggtcactcaggacttgcattatgaatctgggggctcctgtattgggtgcatatatgtttaggatagttagctcttcttgttgaattgatccctttaccattatgtaatggccttctttgtctcttttgatctttgttggtttaaagtctgttttatcagagactaggattgcaacccctgcctttttttgtttcccatttgcttggtagatcttcctccatccttttattttgagcctatgtgtgtctctgcacgtgagatgggtttcctgaatacagcacactgatgggtcttgactttttatccagtttgccagtctgtgtcttttaattggagcatttagtccatttacatttaaagttaatattgttatgtgtgaatttgatcctgtccttatgatgttagctggttattttgctccttagttgatgcagtttcttcctagtatcgatggtctttacattttggcatgattttgcagcggctggtaccggttgttccttttcatgtttagcgcttccttcaggagctcttttagggcaggcctggtggtgacaaaatctctcagcatttgcttgtctgtaaagtgttttatttctccttcacttatgaagcttagtttggctggatatgaaattctgggttgaaaattcttttctttaagaatgttgaatattggcccccactctcttctggcttgtagagtttctgccgagagatctgctgttagtctgatgggcttccctttgagggtaacccgacctttctctctggctgcccttaacattttttccttcatttcaactttggtgaatctgacaattatgtgtcttggagttgctcttctggaggagtatctttgtggcgttctctgtatttcctgaatctgaatgttggcctgccttgctagattggggaagttctcctggataatatcctgcagagtattttccaacttggttccattctccccgtcactttcaggtacaccaatcagacatagatttggtcttttcacatagtcccatatttcttggaggctttgctcatttctttttattcttttttctctaaacttcccttcttgcttcatttcattcatttcatcttccatcgctgataccctttcttccagttgattgcattggctcttgaggcttctgcattcttcacgtagttctcgagccttggtttttagctccatcagctcctttaagcacttctctgtattggttattctagttatacattcttctaaatgtttttcaatgttttcaacttctttgcctttgatttgaatgtcctcccgtagctcggagtaatttgattgtctgaagccttcttctctcmgctcgtcaaagtcattctccatccagctttgttccgttgctggtgaggaactgcgttcctttggaggaggagagtcgctctgctttttagagtttccagtttttctgctctgttttttccccatctttgtggttttatctacttttggtctttgatgatggtgatgtacagatgggtttttggtgtggatgtcctttctgtttgttagttttccttctaacagacaggaccctcagctgcacttctgttggagtacccggccgtgtgaggtgtcagtctgcccctgctgggggatgcctcccagttaggctgctcgggggtcaggtgtcagggacccacttgaggaggcagtctgcccattctcagatctccagctgcgtgctgggagaaccactgctctcttcaaagctgtcagacagggacatttaagtctgcagaggtaactgctgtctttttgtttgtctgtgccctgcccccagaggtggagcctacagaggcaggcaggcctccttgagctgtggtgggctccacccagttccagcttcccccctgctttgtttacctaagcaagcctgggcaatggcgggcgcccctcccccagcctgctgccgccttgcagtttgatctcagactgctgtgctagcaatcagcaagactccgtgggtgtaggaccctctgagccaggtgcgggatataatctcctgatgcgctgttttttaagccggttggaaaagcgcagtattcakgtgggagtgacccgattttccaggtgccgtctgtcacccctttctttgactaggaaagggaactccctgaccccttgggcttcccgagtgaggcaatgcctcgccctgctttggctcgcgcagggtatgcgcacccactgacctgcgcccactgtctggcactccctagtgagatgaacccggtacctcagatggaaatgcagaaatcacccgtcttctgcgtcgctcacactgggagctgtagaccagagctgttcctattcggccatcttggcttcaagagcgggaatacattcttacatgtggttatgttatacatcattttaataggtatttctcacttgtttttgctaatgacttactacttgctgtttattttatttttattttagactatgaaagtgatgttagataaaaagcaaattcaagcaatttccttattgtagttcaaaatgggtcataaagcaatggaggcaactcacaacatcaacaacaaatttggcccaggaactaacgaacatacagtgtagtggtgattcaagaagttttgcaaaggagatgagagccttgaagatgaggagtgtagtggctggctcttggaagttgacaacaaccagttgagagcaatcttgaagcttatcctcttaaaactacaagtgaagggccaggcatggtggctcacgcctgtaatcccagcactttgggaggccgaggcgggcagatcatgaggtcaggagatcgagatcatcctggctaacacagtgaaaccctgtctgtactaaaaatataaaaaattagtcgggcatggtggcaggcgcctgtagtcccagctactcgggaggctgaggcaggagaatggcgtgaaactgggaggtggagcttgcaatgagctgagatggcgccactgcactccatcctgggcaacagagtgagactccgtctcaaaaaaaaaaaaacaagtgaagttgccgaagaactcaacgttgaccattctatgatcgttcgacatttgaagaaaattggaaaggtgaaaaagcttgataagtggatgcctcatgagctgagagaaaattaaaaaatcattattttgaagggtggttttctcttattctgtgcagcaacaacaacaaacaatttctcaatcagattgttacttgtgaggaaaagtggattttatatgacaactggtgatgaccagctcagtggttggaccaagaagaagctccaaagaacttcccaaagccaaacttacaccaaaaaaatgttcatggtcactgcttggtggtctgctgctggtctgatccactacagctttctgaatcctggctgaacaattacatctgggaaggatgttcagcaaatcagtgcgatgtagtgaaaactgcaacacctgcagccagcattgttcaacagaaggggctcaattctccaggacaacgcccgactgcatgttgcacaaccaacacttcagaagttgaatgcattgggttacgaagttttgcctcatttgccatattcacctgatctctcgcgaactgactcccacttcctcaagcatcttgataacttactgcagggaaaatgcttccacaaccagcaggatgcaggaaatactttccaggagttcatcaaatcctgaagtatagatttttatgctacagaaataaacaaacttatttctcattggcaaaaaagtgttgattgtaacggttcttattttgattaataaagatgtgtttgaccctagttataaaatgatttaaaattcatgatctaaaaccgcaattacttttgcatcaaccttaatatttgaaaattagtaaaattgcaaaaagaaagcccttattagctgttaataaatataaaatatataaaatgtgtgtgtgttaaactaagtgccttgagtatatgaagctatgaaaatgaagacaacagccttactaacattccatctcattattgttataactcctggttccatcataatcttgtttttccatcccaacagaatctgaggtgcagtcatttttgtgaagctgttattttcatcacaatgtgatctatacctaatgattacattacctgtacatctgaagctcgttcgtaaaccatcgtcccctgagagtatacctaacataggaaatactatatatatttggccgctgaagtgctataatgatgccctaaattacatatccctttctacagacataatttgctttattaaaaataacttctgcataactattgaagaataaaacagccacttatgcacaaggtgagggatatctgcatatctgagctagacaaaaagtatgtttgataatctattgtatgttttgctacaaaagcaaagtggttccttatgattggctgaaactctttgagttcttgttctatctttcagcaaatgaagatgctaattgtctttattctagccttttataacattaccttggctcttcaaagtcaaatggaacctggaaaatcgaacttaattccattttacatttttcccttgaccatttcccatggtggggaggtatgtgtctagatttggaaaataagcctgcttagttttttttcccagctcagtgcttagaaacaaccccctctagcaaaaccatgcctaggaaaacaaagtatccagctaggctttcaagrttacttgggggcaagacatggatagttacgtccttggaggaaaataaatacaaggcagtagatccaaatgtatttgtcatgcaaagaacattagctgagagagagcttccatatataggtttgcaaaactgagagcaaagccaaagccattcctgggttttgctttgtgatatagtctccaaatggatactattatgattaatctattctgagttccttaaatgctattgtaacaatgtcaggggccaagttcaagtctaaagtacgtgtatgatgatcatagctgctataatactcataatgctgaagacatagtaacaacaatttataataggagagcagttttgtgcagcaaaatagttccgtggagcagaattagatcatgaaaatgttgcatggtgggcatttagtcgtgaaagtataaatctgtacctaatgattgatgtgaatcaggtttcaaacctattagatgtgccatttaaccaggcaacatttgcccattatttttttgcatgaaaagtaattaccgtatgtttaatagttactgaattgtgactggcaggtgtgccccaccataataataatgatgacaataataatatcttcaacttcaactcactctccacaagtcagggcaaagagagaataaacaatgattatttggcgtgtttgaataatataaaagccagtctaggtaatttaaggcaaagatcactttcaaaagccagatttatatatttttccctcctccattcaaataattgtctcagagtcccatttcaacttattttaatagttacttcctgcatatctgtgatgggttctcaaaaactttcaaaaccactttcacatattccgttacttagcccttaacaacagtgtcgaatagggtaggagagaaacattgttccctgtttttcatttagaaagccgagattcagagaggttaaatgactgtttctactccacaaaaagaaagaaatcagttgaattttctctgataaacctgccaacgttagtgatacgaaagtgaccacaccgatagagtggtgtcactgtcaatattattctgttggcaaacatattgtatctggaagtcaagggcaagaaaagaaagttagaaattgctgagataagggctgtgctaccgaaaaaacactgaaagggtgccccagctagggtctcaaacctatacctctccccttcagcctggtacttcaatactgagtagattatggtgcccattttgagggaaggctagtgttatctcattcagattaagttttgtgttggtgtgacacagatgggtttatataattaatgtcatgtcctagagggctgtgaacattcctacacttgaggcagtgttcaaaatctattactgtttttttttaattaaaaaagaatttgttttctttttcccctagatggaacttaaactcattgtatatgattgaagaggaacaaggagaaggagaaggagagaaacaacatacaataaagttgtccaccaattgtcccaggaaaatttgtttctcacataggggtcatcacaactgctgcattgcagtcagctggaagtataatcttccatgaatctgaagatgtgatgaaagatagtaggcacaggcaaagcctagctttaagaaaaacataaaatgaggactttgagaccctagggcctctttccttcttcttccccttgataggcaaaggcttttttccaaatcatctttgtaagaagtcccagacccacaatgaactattgaaataccatgatccagtaatgtcatcttcttctgctattaatatggtaatcattttaggtgatagatttcaccttcaacagttcttgaagaacattcagacagttcaccctgaaatgggtgaaaaaaaatcaggtacctcctatttcataaggatgtgagccaggatgaagcagtatgttatcaggcttggcatttcgcaagctgagtagagtccatgtgatcaccaggtataatgttatgctggagttgggtttcatctcttgcttgggtttggaatgtaaacaatcttgaaattgtatttggagagaaggaaaccctgggaaatgtttatttttaaaaaacatggattttttacaaaagcaaatacatgttctaatttacatcagggagcagatacctctttacttttttgagatttttctgagacattaaccttaagttatcacttgtgtgtatcaggagaaaagttgggagagtgggagagatgggtaaggaaacatttttaaatgtacttaaatctcccatgatttatttcaagctgtaaagcatttctaaaactcgagtttgttaattatcccaaggaaaaagaagagaggaaaatagtcaatctgatagactggtgacattccatgtagcctgatactaagttgtgacaaaatatctaacattcggccattgtttttgatatttgtactttttcttgtaaactatttgctctgggacaaaaagtcattggttttgaacttgatttgggcaactaaatgatatacttaaccacctgctttagcccgaccatgactttttaatgacttccattttatttggttttggaaattgatttgccctttaaaaataatatcagcatttaaagtaattttgcttgttttttgtttgtgtagtagctaaatatgctaagagaatgacttcaaatatgcagcctttatgaagatgtgaaaattgctgtgctctagctacaaatggcaattccgataacaagagcttgaatgtggccttgaggcaagggaaaaacagaaaaagtccactgaaagtcaactttgtccccttaatttgcaggcactgtggggagcagggaatactccatgggcacaggcatcctcccgagccatattggttgtagtgttgtctattatatctgcacagttcctcctttgattctttctatgaatcatgtgttagcaacccaagtagctgccattagctccagccatatgggtgaaggtaggggtagaggttgcagagcttaaacataggtatccagaaatcattggctcttcccatttcctgactgattctccaactatcaatctgcttgtaagcacattcacaccactcagtgcccctggtacataaaacaagagcagtgactgaaataagctctcaaactagcaaactgaacaagctatacaagacttcttggatattgaaaatactaaacattctcatagctatagaattaattatttggaagatattggcaagtaccttttcatgtctacagtgtccatctattaaatgggaactactactctgaaagtagcagtaagttttattaggggaagggggagaatcatcacaatcatctaaaactgttttgtttaatgttacctgccaagatatgtgtctaagaggctgctgtggctcccaccagccctgacctctgcacatcactgaacctgtatcctactgttaatgatacatatgtcatatttacaaatgcctcatgtgtctcagggtggtaaaaatgtttctattcaagaatggcaactaaaaacacccataggtccatcatattggattaaccacttatatccagctacctgaaactactggcactactcagaaaataaattttcttttaccatcttgcccacttaccgttctcagaaagtcctgcctttcctttcccttctttatccaattaacccaacttttagctcttacatcaaatcttctggaaagccttctagacatttctctcccttcctctctgccattatttctttttcaggataggttagatattatactgggcgctctcatagcttcatgggcatacccatgtcaaagtagccagcaatcgctattctaagaaacttgtctgaatttgtaattggattgtaaatatcttgagtgcaagatcttcaacttgtatagttgtatttccaattttcaacatatgttgagtgaatgtattctaaatataatattaagcatggcctatacctggtaatataaacatggaaatagaatgattatttaatttgtcatgtctgtgaaggacccttgatggtatctagtcttaaccctcaacttacagttgaggaagctgaggaccatagtgtattcattcattttttgtttattaattcatgaattcattcatgcaacacattgcattgagcatccatgtgtgcttggcactgagctagccactgaccaggtaatgctaagtagagcagaacaaaagacatggtccttccctcatagagcttacctcttagtgcagtagagacacagtaatccaatcatcacacaagacatttatactcaccaactgtgctaactggggactatggcagccaactgatgtgaagatttggcttaatggcaggagtcaggaagcctttcctccaaggtgtggtgtttgaactgaaatctgaagaaccagcagaagagcacaaggagggaaaggagtttgccaggcccaggccagtgggtttgaagccttgaggcaggggggaatgaggtgcattcaagaaactgaaaggcggaaagtgcaggagcagaagaatgagggactcaagaagaaagaggcagtacaaaataagaatgaaagatggtcaggggccagttctgtaggacctgtagccatttaaaaatgtttagttattaacttagaacagtgagagcactgaaatgtgtgagggtcagaagaactgggaggtggcctgataacacatgcattttgaagaatctctgctgcagtgtagagagcagattggtggacaattgatggactgagcagataggtgagaggtagccctactgggaagaatatgctgaagtgtgtgcaagagattttggcagcctggagagtagagagcaccactgacctctctgttttttctaactttctcaaaaatgctacgttcacctacatcttatcaaagaaggcctttatttacctatacttctagcatgctttgctttagattttcccatttctcaggtaagggcacagaggctaacgaacgctcctttcctggggccaaagcgttttcagtttgggcatctcagtaacttttggcaccactgctggctttaaggagcctgttatgtagtctatggtggatctgaataccaggcagacagatgacatttttataaatagtgtgaggaaaccccagaagtaatgtgaatggatgagagttcaagaccactgctgacctggaaagccaatgactgaggcaccagaggaagtaggctctcagagggaagacagaacaccccctttccagctcattgagagtgaagcaggtgcttttctgaagcaggtgatattctgaagatccacctcctcagaacaagtgttctgaagtttctctgaaatgcagagaatctaccatatgatatggttttgctgtgttcccacccaagtctcatcttgaattgtacttcccataatctccatgtgtcatgggagagaccttgtaggaggtaatttcatcatggggggcagttacctccatgctgttcttgtgatagtgagtgagttatcatgacatctgatggttttttataacagggttttcctcctttgctcggcacttcttcctgccgccatgtgaagaaagatgtgtttgctcccccttctgccacaattgtaagtttcctgaggcctctctagccctgtggaactgtgagtcaattaaacctctttccattataaattacccagtctcaggtatttcttcatagtagcatgagagcagactaatacaccatctgtaagaaacttggaaaaatgatttgtttagagttccatctgagcagtcatattattagtaagatatatatgtcgggaaaagaaatttacttcttatgactttttacattttgagatcttattgtttgatgctccacgttgagggagccatatttctccacctggtcaccaggctcattaggagggacagatgtggcctcacatttcatgtgcggttcttgtctcagcccttctttttctcaaagattcctgccttttgtctacttttctcaaagtgccatcttccttctctcaggctcttttgggattacccaaccaccattgtaggcaactctagttctataggcaactctagttctataggtaactctagttcagtatcatgactttcatggtttctataaaaattgccatcccacagccttcttcacatctgtgacaggcagttgagaggggactgaggaaaagtattgcccatacatggaatttgtggagactcaatcaatgttacttggattgagtaataaaggaagttatttgtctaagtttgggcagcaagagaatggcagggacagaaccaaaagcagtttttaaacgataatctttttttatttttttactattaaatacagcttgggggcaaagaagagggatacaatttgttgactttcattgctacatttttggacaaggaaagagaaacagagactcaggactgtttagaagtccaaatgctatttatttccccatactacaatggctgttgaaaattctcctataatatgctacaaatacaagtgtattagagagtttattgtgtatatttttgaacatagtgtaatttcttgtatgatgttaatacagttcttgttcttattctctgtaagagcttgtgttgctgttatctctagataggagcaaacttcataaaatgtagaattccctctgcatgcatagggaagtagcttttaaaatattagcctattccattgtttagttataaagtaaaatgattttttaaagtgcaggataagtgaatttttatgtttcatttttagttattgaattgtctaggtaatgcattttaggagggcactgttcctcccagaacttaggaaagcagtcattcaatcactcagtaatttttagggatttttaaaatagatataacaattttaggatgtcaagttttagatgtctagttttaacttgtttggttgagctgacatttaagttcagtcccaatgtgatgtgaatggacctagccttttacctcttctttttttcctcttcattggaaaccagtacagagaacayggtcacttaataagaaagatgtttcctgctttgtttccttttattcaactcagaactgcctgggggaaaagattgcttcctttctgaatgtggtaagccacaaaatggaaaatgtgcacacgagctctttcctattaaccttggggaaaggtgacagaaatgtgtgaacaatgctgttagctgtttaaatgttcttttattattattaatttggtttaagggttttgcctaacaagtaactcccttgatttgtatgtttcagagttgtttaatttttctccaaaataacaatttgtccttttgaaattctttgttagatttatgtcattccagtttcaatcttggtgatgattcttctatctgtcatgagtggtttaatctgcatgtttataattatagcatataaagccacataattcaaggtgggtcttggtatataattcctttgtactttttgggaaaataaggctgtaatggaagtaataaagatacctgagttgggaatgtttaggtatcaccaaatattagctgttcagaaaaatatccatgataaattagaaactgaaatcagcacatttttctggtttcggttcttttggggaaacactgttattttttaattcctggcttaagaattgtatttgattatgcgaagacaaatccaaaattttaaattctaatccaagaccttagataaattagggaattagggaatctgtgtatgtattttataaccatatcaccatatattgacatacctatgtcactgaaggtatattgtaaaagataatttggccaactgtattggaccaactgctcttgaactctctaagtacaattggtttaagatattgcctgaaatgactattttgcttatggtgtcattctttcatggtcaagatgacagttctctaggaatgttatttcatttctagaatgtcagccaaacagctttttatgatcctgagcagttatactctwmcatcccaaacacacacacacacacatacatcttacacacacacacacacacacacacacacacacacacacacacacacaaataagccctgagaattttcagagaaattcatggtggaagatctgagattagaacccaggaactcctaagattccttggttttgtatcaaaggtcaataaagagacatgaagtcaatgaagtcaacaactgagggaaacatccctgaggaaatgcataatggaagtgctggtgtaactacctcaaataaatatttctactgaaactgatcagtcatccatttgatcaggtaaggcaggcaagcccacctctgattgcgtagtaattcactgatcattatcctgatttcagtggatctatgccatactcaagacctacatttgtcagtgacctgattgtcttattgccctacacagacatataatcagtccagcctgtgtgaaactccttgtgacccttatcatcatacttaagctgttttggtctttcaaatgtattcgctcttctttaccattttgaagccatcactctttcaccactgccagctagtcttagtaatctttcaccgtgcactgtctgttgcctcactgaatcctcacagtcattctatggcataggtaatatgattgtcattgacattatgttcataagggatccaaggttcagagggattgtattgttcagggttgcacagctaatttctagtaaagccaggaatcaacttgcgtctatatgattccatggtctatgcacttagctgtgatgtatgcgttctatctcaagtgatcacctctaaaatcaggatcagttcacagatatttgtgagtctctcaagagaactagggaaacttctgtaaagttagctaatggctttttaatgttatgtggtaattgtggtgaagcaattgtcaattccagttaaattagcttaaaatgataagagcaaacacatatctttgatgataaggctgggatagaggttaatgtctcatcaattttgggtctctcttagatgtttgaccttatcctaacaacttaagctttaggtaaagtctgcatttggtactctaatctcttcctatcagacacaggtgctcttctctgcccaactgcaattcagtccaagacatgccttctccagttagtctctggagaatgttgttcctacttagactcactgcatagatcttaacttgtactcctgctggtggtgtgcatatatgagctgtcacttgaccatgcagccacacctggagacccatttctaggttcagagtcatctctgatgcagcctgtaatttccccactagcatgccactctgtaggaatgaaccagacattgccacatcattctatgtagcattttcttaaaattagagcttcactataaacaatctttggtcaaggaaaggctttgttatctactccatggtctctttgagaaaaaaggcctggtcccattaagctcttgcctcgtttttgcctttcagggattattcgtgctctgtgttagatgtgaacttttggttaggtacataggaaatatctacctaagacacttgtgatttccaccaagtttgaaacagcaatctaaaagctaactcattcattaaatgatggaattgttaagttggtataaagtgatggtacaaaagcccatcagggcaggtttgaaatctaaatgcctttcagtatgcattgaacatgcgcatccatgagaaaatagtatgataaagaaagcagggtgtgaccttattggattcatatttccttatagaacctccaaattaagacaaatttccagacatttctaaaagcagcaatacaatcaagaaaacaaaacaatgagattcagtatgtagctactgcaaatttgtcagaaaataagtgggaaaataacaagatcctaggaaatctgttgtatggagctgaggaaaaggaatgagtttaggtttttctttaagttattgaagaaggcatgggattatcttctggttgctagtcttcccttagtttcaatgggaaacttatcagacacacttatcttgcagaagcaagataagaggacaaaagaatttggaagatcatggtggaattaaaaaaaaaggaatgtagtcagatggtaaatttagtctaattatatttagagatgggttaacataatcagaaggtaaggaacccaattatgagataggtgtgataacatagatggcttaataaaatacaaaatagaaagatataaatagaatgcttttatataaattctggaggagtttaaaaatgagtgagtgttcaagataacttagaaggaaagatattaatataaacttgaggtatgttggtcttgaagaaaaatgaaaaagctcattttgtgaaatgagtggaagaataccagctctttttcagattttcaccattttattaatattttttgattatagaattttaattatgtaggaaggaatttattaaaaagtaaacacaaaataaaaccaatcatatagttttggccaaattgttgcttttcttttacttcatttcctaaagggcatttctcagagtcacttgaaagtaaaacttgagagggttttatttttttgatttatttatttattttttttagtggctgtttgttgaaaaaccttgttgtaggctgctaggcattcttttactaagaatttcgaatgcacctcatgtgcaaaagactgcttaagtgtgtcactgcagaaactagcaggatttcaaaatcaaactcatcagttttctgtgataggatgatggtttgggagatactcaagaaaggagtacgtgttagtagctgaagatttttctgtcttcttccttgtgttgtcagatccacacttttattttccttttttttttttttgagacggagtctcactctgtcaccaggctccctgcaatttctacctcctgggttcaagtgagtctcctgcctcagcctcccgagtagctgggattacaggtacgtgccaccatgcccagccaatttttgtgtttttagtagagatggggtttcaccctgatggccaggatggtgttgatctcctgacctcgtgatccacccgccttggcctcccaaagtgctgggattacaggtgtgagctactgtgcccgtccttgttttccttttgtcaagaaagccagacattctgtgacacggtaaatgaaaaagggcttggacccaaccccagctctgttgcttgcttgttgcgttgccataagagaccctcaagaagaayctcacaaaatccactgccctcccttagtctcgctttcccactaaatcgctccatgcaaggggagccatttatattgcattaaacttttctcggtgttctctaattccaggggttcttactgcctgagagggtcactccaccatgtgggtaagcggggtgtccagagtctgcccataggccatcagcatcagtttttcaaatcctgggactttcactaaaaaactgtggttcttattttaaaaacaaaacaaaccaaaaaaactgcaaggaagcaaactccacaaaacccatcaaaaccccaaaattttcttaaccttaataacttgttctttttccatgcatatctaattcctccttttaaaaaatacctaaaaaattgaaattggtttaccacatattcctgttggcccacgacacataatgattaatattttttcctttataaaaaattgattgcttttactgtgacaactttgacaaagtctttcaaagagggagagaaatgtgaattcaaaaggataatgtggcttttattttttttactttgatcctgttttgtgaagcattacctaggttagtattgcctcatgttaatcagtgaccataaaggccattaggatgccttgatagatgcccttggtctcccttgactttgattgaagcatcttaaaggcctgtatgcatgtggcacaacatctaacattgtaattgctcactcagtagctctgagcacttactcttcaataaattcttagatgccgtggggatggcgaatgaactttttaattacatgtctgttgttttctatcaccaggaactaaattaatgggaaattagttcacaaggtttattatgcattttccctctttaagaggggactctttctgacagcccttccacttttatccttttaccatttttttttattggcctcagtactgaaattccttctttcttgttccaactacatcagaaacattcaatagacttagcagcctatgaaagtctgacaattacttcctcacggcagccttgtttcaagagtaggtccagaataaataaaagtttttcattttcctggtggcatctgttagttttcaacattgcccagagaaagagttactgtggaatacaaaaaaatgagctatttttttcttccttttggggagaaacagacatatagaaaaccatgagtgcttccttcataaatcatattttatgtgcaaccagtaagagagagagatgatgatggttgtggaaaagtcatagtggataacctcaatttattcagtcttctgagataatgtaagagtaaagcatggaaacaggaatacagagttcatcataattatagatcatccattcaaaacattttgaaaacagtgctatgtaaacttgggatgacaaataatgaagcatagttaacacttctcattggttgtgaattttcaaatacatccaagtatttaatcatggccattcatcattctgtaaatcaaaactaggtctttgaattctctccctttcctattctcagattaaggcatatttggtttcatataaaatcttatgcataattttgaatttcttgggccaatcaaataatggtacataatttaatttaaaaaacttttcagaaggagaaaactcatgtttcacatacttcttattaatcctaaggcctagcaaagggtacatacagctgtagttcacctcaattatacactgtaaatatttagattagagacacgaaataagttttgggagttgcaagaatagaatcagatgtaggaggtattcttgtagaatagagatggagatgggatttaaaattttttatttcactgctagagcaataaaatcagtattaaaaacaaggagaggctgggcacgatggctcatgcctgtaattgtagcactttgggaggctgatgtgggtggatcacgaggtcaggagttcgagaccagcctaaccaacatggtgaaaccccgtctctactaaaaatacaaaaattagccgggcgtggtggcgtgcgcctataatcccagcaacttgtgaggctgaggcaggagaatcgcttgaacctgggaggcggagattgcagtgagctgagatcagaccactgcactccagtctgggtgacacagcgagactccgtctgaaaaacaaaacaaaacaaaacaaaacaaggaggggcatgggcttggattttcataggaagagaggctgagaagaacaagaatgctgacatttgttttgtgaaatgggtctgaatgcctataaaagactagcaggtactcagacatgcctgtcaccacttggcagcaaagcaaggaaataggacagtattacatttgtgaagttgttgatcagaaaactagtgtgcagaggaatttgtgtgttttaaaatattcccaaagtggcagaatattactgacatttgaaacaatagcacagtctacctatgttaaaatggtatttccatttttaaattatattttttcaataaaagtcttgctctcttcttaagttacagatttttactttttcattttgcttgttcctgtgctccttgatccatcaatgaaaatgtgattttctgttggagtcttcgataaatatgtaaggctattttcattgcatcagaaagctgaaagggaccttggctgatcatttgtgtaattgaatcgtgtctgcgtttagggcacaattttcattttatgaaagaaacacaagatttcccatgatgttttgcatgtctacaaattcaggcgaatgagtctttcctcgggctcagtgagatcagtggggtcatgctagtgaattaactggcatgatatttgcttaacaaaagcatgccataaataagagacttaatagtcagttggcaagttgcttcatgctaatgctgtttttaaaatttaaagtaatggatgaaataaagttttatatacatgtctggatttttgaaaaataagaagatttgaggcatagtgtattatagcagaaatgtcttttaatttatttttagttgttttgggtacatggtaggtgtatatagccaaaaaccacaattacttttgcatcaacctaatatttacagggtacatgagatgtgttaatacaggcatgcaatgcattataatcacatcatggagaatgaggtctccatcccttcaaacatttttgctttgtattacaaacaattcaattatacatttttagttttttaaaaatacaattaaattattattgactatagtcacccagttgtgttatcaaatagtaggtcttatttgttctttatagctatttttttgtacccattgatcatccccaccttcccccaccccaaccctcccactatccttcccagcctctggtaactgtccttctatttccatgtcttttaaagtgtctccctcatttctgtgtacatgtgactcactggggaataaacagggaaatcctttgtgatgaatcagatgtcattctgagacacagagcttcttatacttttctttaaaatcatatttgcccttctagatcagtatcaagcaaataacaaccaagaatcaacatgcataaaaatgacaaggttatcccagagttctagttgtcattttcatagttgccagcacccttttccaggaaaacaaagagagtggccatctaagtgatgccgttgaggaagctgcctttcccctaatttctggagagcctagtgtagagggagaactcctgcctctgggaatatagcttttagggcatccctttatccattctccaccattccttcagtgaaggaaattataaaagcaaaactgggacccaaggcatgctttgagtctctttgcctcagcccgggcaactgtattctccgaattgagttcattaatattgtcttcttaggagaaatattatctttctccagactgggcagggagtctggcttgagaggcaacaataaagaaagaatatgtcttcctctataaagaaaggccactttataatgaatttcctttagatcacgaacagcactgtaagacccagactgtcaacttgtgcttttgaggttaggagctgagaaaactcttcttgattaataattgagacctaaacatggcaaaaaacaggtctgcctcagcacggagatcatgcatcgaggtggcgggcgatgccttcagtgggttctcttttcttcctgtctcctctgcgattatgtggcaagtttagagtcaactacaggaggagtttcagacaagaagcacagtttgatagaaactaatttctggattgtgattgtgtgagacctcctgggtgttcctgagactttcggaggatgattcttggccttgctttgtttttgttcttttcttctttaggttttcatctgaaggcaagtaactcatgtccctacaaggaaattcccctgaggaattagagataagcatgcatttctcaataaaacattttcagaaaaaaagttgctgtgtttccgggagaagcagatggctgctattgagagacacctaggtttgtgttctgggaatctgtctcctactcatgatagcagggggcagattcagatctgcaggaggtagaaataggcatcagatcactctgtcctaaaaaacaaacaaacaaacaaacaaacaaacaaacaaacaattggaagaaatgaattgatcacagaagcatctagagctaggaccaattaaaagtcagttagtttatatgacctatttgaagatttctcaacaatcttgacctattgcttaagagcacaacatttgtagtaaaatgagcctaagttaggatatgacttaagatcactgaccagctgtctaagcttgttagggttacccaatattgtgaaacttcagtttccccatttaaaaatatggaggcaataatagcaattacctaactggttattgcaagcattaaaggaggtcatcaatttctgtttgaggttggaaaatccttcaaaagctttctattcatttgagtaacaagcaaaacattctgatttaatatctgtatgtgcttcagtgtctttgattatcacatttagaatattcaatattttacttgtaatagtgaataaaaagtttgctggttgagagagtgaataaatgggtgaatggaagagtaaataatgactcttgtaacactattagttatggagtggatacacactagaccagtggggctgagaaaatttaaaaaatattcaagcagtagaaatttttacttaataaatattgcttgggaggctgaattaatgataaaaataaatgttttgcatttgacattatctacccaataattcacttctctctgcattctctcactctcttaaagaagggtaccacattgatgatgctaaatgattcttgtagaaccagccagaggtggaaaagaaagtagttctgacacttggttaaaaaatatacatatacataaataaagtcaaactccactgccatctctactcaaagtgtgtgcatactttcttaagtacacgctgagatgactcattttacacttctttttttacatatttaccctgttttaatgggttggggaatggcaagagcaaaggaaagaatagctgattaccattcaagacacacatccaaatcacataaagaaatctttagatctgagaataattgtgaaaagaataccaaattccagtgtagctttaaaaagtgcaccgttatctttaattacctgcttgatagaagaatatttattttggaataagaaggaataatttcaaagttgatggccttgttataaatataagcaaattaacttttttagaaagccatttcgaactccgaagacaccagcaacatttttattgattaattctttagtgttataacaagcaagttgtttttatgccgtatttatgagctggtatataatcacacatctcaggggtggagaggaccttaagaatcatccacttcaacagcttatttgaaatgtgtttgtttttatgttctgtatatattctgttcttttggttatctctctctctctgtctctgtgtctctctctccatgtatgtatgtgtgtgtgtgtgtatgaaatagataatatatataaattatcataaaagtatatttacatatatattttaatgcccactctattggacttgtaagaaaatcttacttctataaagtactctagaggcatatacttgtagcttattttgtgacatatgtttggtcatacatctaataacaaatctttgatcaggagcataattccaattagagcagtggttcttgacagcggcagtgttccatcctaggtattttatacatgtatcagaattttattttatcatctcaatgactagtaaaaggcaaggttgctgggtgccctgtgatgcatgtgacaatctttctcaaaaggaatcctcctgcttctcctaaaatatttgaatgacccactggattttgatgtaggttagagactgtttataatcatcggagcctagattttattttacttaaatcgcagagtactgtttttgctattttaatatgctgtaagttttcccagaaaacaacttgtataaattgacaaaacttattttgttcagaatttttccaggagatgctcaatatttcagaaaacgacctatctaaagrcaatagtgtttgtggcatttaagatagaaataaagtacaaaccgtcagtctgcatgcaaactgtagttactgtattctcacgattctaattatgggtgcaggcacccaggactttgctatgttttcaaatatagtttttttctattgctatatatggaaattcttataattttattctgaattaataaccttacatcttttttatgatatacttgggacattatattgatttttaaattttgtatacagataggttgtattatctataaatttcaaatcatagatgatgtaacttattatgtctatgataatgaaagaggcattaaattatgtacgagtgcaataaggagttgcgtttgatagggccaaaaagccctgaaataaaaaagcagtatactcaggggaatttgctacatcttctagtacaagtagaattatggggcaatatactatttatcgattgttatatagtaatatcgccacaaactgagtggcacacatttatcatcttagagtttctgtggttcaggagtctgagtatggtttagctgcaacatctgcaaggctacaatcaagatggtggccagagctgcagtctaatttgtaagattggctgggaaaggatctatttcatgagtcatgcagttcatgtaggaatcgaggtccttgaggcctgttggactacagacctcaacttgttgctgtctgctggataaaggcttcgcttacttcctcaccgtgcagctctcttcagtatggccacttacttcattgaagccacaaagggagaaagtctgaaatcaagacagaacatataatcttatgtaatgtcatcatgaaagtggcatcctgttggcggagcttgcagtgagccgagatcgcgctactgcactccagcctgggcgacagagcaagactccatctcaagaaaaaaaaaacaaacaaacaaaaaaaggaagtggcatcccattatctttgctgtattccattggtgacaagtaaggtatagattccacatgtactcaaggggcacgyattacacaagggatgaccactcacctgcaaggataattgaggaacattttcgattctgttcaacacagccaatttcctatagcagtgttaggtggaggggatgagttattgggatcagaaggtagctagtgtgttctgtagtctttattccaatgaaagataactttacccattaatgtgaagtcaattgtactcagagaagagggaaaactagattactagaatgtaatctgtttaagtcttgtaagactacaaagtccttactaatttgatgtgcatttctctgatgagcatttctgtagcactggagtccagtgatgcagggatgggttatccacattttctgccactcaagatctttccatccaggtgatccagctagttctcaggcccatcaaactttgatccagggtcagatctggaagaggtagagagcatttttttaattccttatttaaaaaatgtgatttttgtgggtcatgtgaaggtttgttataaagataaacacgtcatgggggtttgttgtacatattattacatcattgaggtattaagctcagtacctggtagttatcttttctgctccgcttccctcctcctaccstccaccctcaagtagacctgagtgtctgttgtttccttctttgtgttcctaagttcttatcatttacttccctcttataagtaagaacatgcagtatttggttttctgtttctgcattagtttgctaaggatgatggcctccagctccatccatattcccacaaaatatatgattgtgttcttttttatggatgcatactattccatggtgtatatgtaccacatgttctttatccagtctattattgatgggcatttaggttgattccatatctttgctattgtgaacaatgctgcaatgaacattggcatgtatgtgtcttttccggtgaggttgcagagaaaagagaacccttacacactattggtgggagtgtaaattagttcaaccattgtgggaagcagtatggcgattcctcaaagggctaaaagcagaactaccgtttgacccagcaatcccattactgagagcatttaagagtcaaatgtattcatgacataaatgtgtattgaaaatctgatatgttttagtgattgttttatagggagggggcagagactctgcttttatgaagcttacagtgagtgccagccaccattttagcttttgggggccttctctaagaagggtggagtagttaatgtagacaaacatgggttttggmagcatacgaccatgaattaacattatatttccgcttaccagccgtgtgattttagcttacgaaagctactctctggttgtttatttcttcaagtgaagaaatgggtctaatagtacctatcacacaagattttctgtgaagattttgtgagatcctrtatattaagcacccagtgcataggtgttctcaatgttaaatcccctctccatgtctgaaccttcaataaaacagactattacaaattacatatgaagactttgatgtttaacgtcatccacacaaagttaggcaaaagtcatatataacaaatatttaagtaatcacctggaacaagatctctttagttattttttaaatatgagatctcacaattattctcagcatttcctgttcattgttttgctatgggtagcatgtcctgattactcagttatacaaaatatttgaatggcttaaaggagtatttgtgtttgacagcataaataatattgtttttgaaaatgtatgaatacagatagaaatcaatggactggagtatatgcatttgtctatcttggattgatctagtgtattgagtcacaaaatttagttgatagaagggatagagtatgagaaacagagtcccacaactttgcatcaacttagaaaattattcttttatttaacattcattcattcattcatttattcaacatttttaagtttccgttccaggatcttgagtacagacatatgtggttttattgcactttgctttatcatgctttgcagatattgtgttttttacaaattgaagatttttgacaatcctatgtcaagcaagtctattggtgccattgttccaacagaatgtgctcactttttgtcacattttggtaattctgaaatatttcaaaagttattattaatctgttatggtgatctgtggtctttgatgttaatattgtaattgtttgggagcacaacaaaccatgcccatgtaggttgcaaacttagttggtaaatgttgtgtgtaatagttgctacaccaaccagctgttccccaatcactctccctctccttaggcctccctattccttgagacaaaataatactgaaattaggcaaattcacaaccctataatggcttctaactgttcaagtgtaaggaagagtcacacatctttcactttaaaccaaaacctagaaaggattgagcttaataaagaaggcatgtcaaaagctgagataggccaatagctaggcctcttgttccagttagccaagttgtgaatgcaaaggaaaagtccttgaagaaaactagaactactttagcgaatacacaaatgataagatagtgtgacattctaattgctgatatggagaaagttttagtagtctggataggagatcagccacaacattctcttaagccaaagctaactctcttcaattctatgaaagcttagaggtgaggaagctgcagaagaaaagttggaacctggcagaggttggttcatgaggtttaaggaaagaagccatcctcatagcataaaagtgcaaggtggtgcagcaaatactgatgtagaagctgcagcaagttatccagaagatctagctaagattattgatgaaggtggctacactaaacaagagattttcagtgttgacaaaagggttttcttttggaagaagatgccatcttggctttgaatagctggagagaataaggaaatgactgacttcaagggacaggctatcttgttaggggctaatgcagcaggtgaccttaagtcgaagcccatgctcatttaccattctgaaaatcttagggcccttaagaattatattaaatctatcctgcctgtgctttataaatagaacaactaagcctggatgccagcacatctgtttatagcatgatttactgaagattttaagtccactgttgagacttactgctcaaaaactaaaaaaaaaaaaaaaaaaaaaaaaaatactcttttaaaaatattactgctcattgacaatacacctggtcactcaagagctctgatggagatgtacaagaaggtgaacgttgttttcatgcctactaacacaacatccattctgtagctcctggaccaaggagcaatttcaacgtctaagtcttgttattgaagaaacacattttttaaggtgatagctgccatagatagtgattcctctggtgtatgtggacaaagttcattgaaaagcttctggagaggattcatcattgtagatgccgttaagaacactcatgattcaagggaggaggtcaaaatattaacatttacaggagttttgaagaagttgattccggtcctcacagatgactttgaggagttcaagacttcagtggagaaagtatttgcaggtgtgatggaaatagcaagaaaattagaattagatgtgatgcctgtggatgtgactggattgttgcaatctcatgctaaaacttgaatgattgaggaattgtttcttacagatgagcaaaataagttttcttgagatggaatctgctcctgatgaagatcctgtgaacattattgaaatgacaacaaaggatttagaacattacataaactgggtagataaagcagcaacagggtttgaaaggattgcctccaatttctcaagaaattttattgtgggtagcatgctatcaaagagcattatatgccacagagaaatattttataaaaggaagagttaaagcagcaaatttcattgttgtctttaaaaaaacaattagcacagccatctcagacttcagcaaccaccatcctgatcagtcagcagccatcaacatcaagggaagaccctccaccagcaaaaagattatgactttctgaagattcagatgatcattagcatttttagcaataatgtatttacaaattaaggtatgtacatttttcagatatgttattgcacacttaatagactacagtatagtacaacttttgtatgcactgggaaaccaaaaaattyaggtgacttgctttattatgatgttcactttattattcagttcactagaactgaacctgtaatatccctaaggtatgcctatgcttgaaaaatgttatcagtaagatgtgtaatgtgtgacaaatccagataatacattacttttggagaagctgagctgtttcaaaagtgttccttttatttgaagaagaagcagagtagcccaatcaagtaattttatttattttgaacttacacaataatttacgcttttgtttttcagcaagtagtaagggaggtgggttaatctgaaatgaaatgttcttagatcctgytgttcagttggttggagggcattaaagatagttattacttaagatctctgttgttttgaaattcccattttcctctgacctaaattctatgatgtaaaagaatcccagccaccacagatagactgtttttccttatttaaatgctttaaaatttagttttgacggaatggtctcttaatagaattcttgtgattctgtaacatcttagcatctttggttggcacttagaatattctcccacaggcatatttcatttgcctgtatgcttgtattcctcattagcttatttcctctggagagtgagactctgtttctgcatgtaacagttgatcagtaaatgttttgattattactatttagatcctgaacatgaacgggctcctattcctttcctattgctgcccccaatgaatttttacattcaaaaagtaatgacgtgttatcttggtttttgtttctgggaaatattaggaatgctttttggcaaatttcaagggaatcctatttggcattagaaattatttattttgaggcctcgtgtaaaataagcttcaggattttgaataactttgggccctggagagagtaatacctaatgaaaactgcaactcaaagaaataatgaaaggcctctttaggaatcaaggtggtagctctagctcttgaagtcttctaatcaaagagtcaacaaccatttttgatctctgatcgccaaagcaggcctcagaggggtcaactggccatgcagcctgatctcagagtaatggctcctcctatttcaagattcaactcaagcatcaattcctgtaagaaaccttgacagaactgccttttctcccacctccaagtcaatgtgaccactccctttttgccttcactttctctcctgacttgcatttgatcagctaaatttatgtaaaaaaatgaagcctacaaccctaagctgatctgaaacacacagcaaatggaggtagccacatatatatttgataatttcccagtttatagcataacagttaaatcattgtaatttcttatggaatgtatggatcaaacattacatttattctgtattgtgtgcatttggagtaatccatttgacatttttttttacattgtgctagaaaagttaatgaggccactgaagagaaccaaaagtaggaattagaactgaagatacagcaagaattgctaaaagaaaggaaatactgtataaaagagaaaaaagacttttatggagtgattttagagtaactatggctttgtaaaaatgcacatcagtttatcagttttataagccaatgcttggtgggtatggagtttttcagtgatccagtttcaagtaaataagcaacgaataagaagaaattgtgtttctttctagaatgtgttgtcaaccactgaatttaatgctaccaatagatgcagactcatgaagtgcagtatgatttcgataaggcctaagcaattatcaaatcagaaatggatctctcatgctataaaattgtacatttaagcaaataattttaagataattggctttcaaactatttttggatgtatcagaagggatggttgtggaaataacagcacagtaaatgaatagttactggaggacaggaaagcagaaaaaaaatctgaagtgtaaggagatacagtcaagctgtttataaaatacatttagatacaaaagaggtcactgtgtggaaaacctttagaatcactgttgaaagaaaaaaaaatgtccacttcccaatttcaagttctattgggattgtttgtattataaagagttgactaataaattcctgccaaggattatttccctatccaaacaaaatgtccacaattctttatgagagaagatgatacccatagcttctgcttcccgcagtggcactctcatcacatatattggtaagtatagaggtgccaaggagaagcaggcaacagttttctccatagcatccatagtcatgctgttcagcagataagcctagtacagttagtatgtcctgattttttgctaaatcctgggaaaaatgaaaagagtcttccttatgcagttgtgttttgctgctgagttgtgtttgcagtgtattagaagaaatacatgtaggaagcctgttttcagtacaccactgtattactccatggtcttgaatttctgaggtcttaaaatagggttattaatattacggagaaagtcacactgctgggtaatctgrttgaaatggagacagagcataaaccaatagaggtgtacacatatactaagaattttgactggttaagggaaacaagaaacaaatgtatttgttttcattagtaaatatgattttttctcaggatatgagtaagaattagtgaagagggaacaatattaaattattttccttagtaaggtaggatattaaaaattaatcccttctatttgtcagttttccatgtccagagttaattgaacagttgtgttaacattaatataacattgcttgctggctaccaacaataatagcatggaagaatgttttaaggtatgtcttctggtagaataactatatcctcattattaacagtgtggaaaatgtagaaatgtagaaggaagcaaataatcactcatccagagatgatccatgttaatgttttagtgtatttttttctatatttgtagctttgccaatttcacacagttactttttaatatatacaccggggttaagtctttgtatgattacaaaataaattcttgttcaatttttgagaaaaataaggaaactatgaaaacagtataaagaagagcatgtgtgattcctagaaaacagcaaaaataatttggaactgcttttaatgacaagggtaggcaatcaagtttgctaaaatgaataggataatcagctccagccataaataaattagtatctttttaatgtgtctgttgtgtgtattctgcagctggctcttaagtaatttttaaaggaggcctgatatgtgttcggagggggagcaacatgattagaatatggtagctagcttggaataggcatcatcaatgattcgaatgcatgctctagatcatgcatgctttggaagctacaaagcttctccaaatcttggagaagcaacacagtgagaaacctgtcactaagcttttgaggattcctatctggaagaggactgttaacagtaaactcaggctgcagttgattttctttccatcatcaacatattatctgggtctagtgaattacaaaccctcctcttggcttaacattctctctgatggctttctgcacattggcttcctcttcttgctatcacggtaattactcaggagacataccataggttttcttgggtttagatcagcttaggaaagaaaagaaaacttaatcagtgaacagatttctttggcattttccatgtaatcctgggacccctgcttgttagttttgtcctgtttcctgttacagaaaaggctgaaaatcagcatgcagatgaatgagatagcagatggttttcccgtgatagagaccaacaatttgtgagatagaatagtaacgacaaacatacataagagaaaaggcagaattagagtacagtattttaaaagctttcaggcgctcaataaatgctcactattgttaaagagagagaaaaaaggaagtcctgtataatacatcaataagattttaattttcagttattattatttgagctttatttcccagctctctgacacagatttaggggtggtgtggatattcttagagtggaaattattgaactcttagattaaaggtactcgagttcctagcttgccctgtaactacacatatagagaagatcactctcgtaggtgctagtaagtaggagataaaagttttagggggaaacacagagggatactcagaactgggagcagtcctaaggtggaccttcaaaatgattcatgtcttagaaaatatgatttaagagaagttaggtctatagggtcattttatctgaggaaagatggctgtaaggatctttaatgataggagtcaaatatatgagagattgttgcaaggagaatgttaaccagctattctacaactcgactggggatagaaatagctttaaattacaatatacagaatttagattagataaaggaagtatgctctgaaagtaagagttgttaaaagttagaatatgttttccaagtaggttacaaaattgttttaataaaattatttgtgtttattcaaaaataatgaaaacatatatattacatatataaatattgatatattacatatcaatatataaacctaggatataaacccaatatgtaattgatatgttacatatcaatatatattatacatgtattgatgtcttacatatcaatattatacatgtgttgatatattacatatcaatatattatacatgtgtttattatatgtgtgtgtgtctatgtacaaaaagatagctttttgacctcaacagcattataacttgataattgtcttattttggaactcacgctgaagtagctttcagatactgttctagaaggcttaaattaagtatgttgacaataccccaaactactggatgatatttgtaatgaatttcaccctatatcagtacagaagggtgtcacagttcagcaaaacaaaagagaatacgctttgttaaacctctactttctgaattttaggacagtgaggaaatttaacattttcaatttttttttcttttcttgactgaaaagaaagtcaagccagcaatatgtttctgagagagcagtgatgcatttcacaacactgttaactgtctgcttggctttttgaggcttccagagttcagaattgtcttctcttgaataggtcagtgcatttttttccttcagtttttctccttaagcagcaaaacagaccatttaacttccaaatatttacagcttgcaaacagataaacttcccaaatctgtttttttttatgaaaaggaaaacgatcagccacaataatctataatacgatatatttgaatcaaagttattagatgccctagggtcttttcatggcagattttatatatcaccaccattaataaatctgttatcagaattatgtctttctctctgttgatagttatttttagactaacatattcatacctccttctgatgaaaaacattaaaatttgaataaggcatattagaaaaccctaaagctctgtatttacacaaaggagactcataaatattggtttttcagggtgaagcattgtgtgttattccattttgtaccacagggaaagcctagtcacacatggggcctcattaaaagaggatctaaagaaatatttaatggttgaaatataaggtcttattctgaatatctaccttcactttataataatagaaactgaactgaaaagattcagtaagtgatttagaacatccactcattttaaaagtaatgtctaggcctaggaaagtgacatcatgttccaaatgttacaaatccagcgtttttccttgatgtctttataaatacattgtttacagtttttattctcctccatatatgatgccccttttctaagattatttcgtaggtatatcctttaatgagagaacctcataaataaacttcctgaatttgaaaacgagtgagaggagacttcaagtttgtggactgagctaaacatgtgtctactctcccttcaaacatcccatggaaatggcagtaaagacagaacaaagagaatacatttctgaatatactgaggaacatatactccagagagcagaaacaggaagaggggcctctgctaaagctgaaggagtcttcaggagggaacccagctgggctctgtgttctggttggcagatacagagagtagccaaggtcaaaagcagacaaacagaaagtkaggtgattggccacaggtttggaaatggctcaggtttgctctttccaaccccttgcatgtcactgcacatttacctccagaagtaaagcaggagaactctgcaaagggaaccaacamtctgcatgggagggcattgcctccaagtgtgtgggctggcgaccaagtgcagccctctgccctagttatgggagttggagagggacttactggtttgcatgttccatgcaagagctaaagcaaagcacatctcggagaagtgagccaggaaagtggatcaatccatgccaacaacctatattaattaacctgataattaatatgtatataaagtgaaaaaaaagaaagaaaaaagggaaacagccatgagacaggatttcacaacctctgcactatcaacattttgggcaagatactcttttgttctggagaagtgttctgtacattgcaggatgttaagtagcatgcctggtctctatccaattgatgtcagaagcaagcaacatccatccctggccactgtgaacaaaaatgtctcaatatctagacaaagatattgcagcatactctggaggacaaaaccagcactagctaagaaccattatcctagagaaaatagaaatggtttagagaagagatcttttcaagatatctaccttggtatcctcagacatactgaagaattacagtctctaaaataattttctgatacggaaaatgaagaaatcaaaggacagaaataacccacggaattttaaagtttaattaacaaaattgttgaaaaattcaaggaaaccttccaaaaggaaaagaaagaagaagttataatatgtgaaaaaggggaagagacaaagagaatccgtttaggaagctaagtgtctgtctaataggaattctaaaaccagagggaaaaagcacaataaatgagacaaaataatcatgacatttcctagagttaaagaaaggcacgtcctcagaatgaaaggcccaaataatgttgagaacaatgaattttaaaatacctacatcagacacatgctaatgaaactttagaataccaagacttaagatcctaaagattttgaaaaagaaaaacataaacaaacattctatcataggaatgacaatcacagtcaagttttcaatctgcatcttgaaaatgccagatgataacaggacagtgacctaatgttcggacagaaaacaaacctaataccaaatggaatcaaacaggaaactcagaaatagacacgttaatatgctcaagtgatttttgacagaggtacaaaagtcattcaattgccttttccacaaatggtgctggatgcccaatggcagaaaaaagtaagtcttcacctaagtcttacaccttacacaaaagtcaactgaaaatggatcacagacttaaatataaaatatgtacctataaaaccttttagaaaaaaacaggagagtgtctttcagatctaaggtgagccaaataatgggtcgacttgatactgagatcacaacttataaatggaaatgttgataatttggactttgtaaaattaaaaacctttgccctgcaaaagaccctttaaaaggatggaaagacaagctacagattgggagaaaatrtttacaaaccaaatacttgatctaggactagtaactcaaaagtcaacagtaaaaaattttagtaacaatctattttagaaaatgaacaaaagacacaaagagatatttcaccaaagaggatatacatttggtgaaaaagcacatgaaaagatgttcaaggtcattaaccattaagaaaatgcaaattaaaactacaatgaggtatcactatccaactatcaaaatggctaaaataaaaagattagtgacgagaccaatcgctggcaaagatgcggagaaactggattactcattcattgctgctgggaatgtaaaatagtacagcccatactagraaagagttcaatttcataaattaaacatacaactaccatatgacccagcaattgcattcctaggcttttctcatagagaagtgaaaacttgtgttcacatagaaacctgtacgctaatgttgaatgttcacagcaactttatttgtaatagctgcaaactggaaacatctccagtgtccactaatgggtgcatggttaaacacattgtgatacatccataccatggaatagtattcagcaataaaatagaacaggcatgcaatggaaagttacatgcaacagcctggatgaatttccagagaaatatgctgagtgagaaaggccaatctcaaaaaattacataatgtatgatctaatttttataccactttgaaacmataaaattaaatgaagaacagattagtggttgccaggggttaagtaaagtgggaggaaagtggttgtggctataaaagtgccacatgaggaatgcttgtaatgatggaattgtctgtttcttgactatgagtgtcaatatcctgaatgtgatattgtgagatgttaccatgggggcaactgggtaaagggcaaatggaatttgtcttatttcttacaactgcctatgaatttacactgatctctaatgaaaagtctcatttaaaaatttgatagtgcttgattttatcagttgatcaagctgctcttagttgaaataacaatttcagaaggatcagcataatgaatctaccagtcactgaaaactctcaattatctgtcttgtcttccctttcagtttttgtttcatttctgttttagtaacctcttagaaaaaggtagtattaaaggagacctaggtctcttttaccaatttaggataacttcacaatctccgcagataaattggtatstgtgtacacacacaaaaataggaaattcttgtgagtagtttacaggggaagtgcttaatatataaacaaggcagtgctctggtaaaattacttattgcattgagattaagaacataataaaattattaaaatagcctaccactttcattacagacttaaaatgttcttccttttatctctgggggttkgataatccctgtttattgttcttttattttgctgtatatcacgttggccatttaatcattggctctttagcagggtgggtgtagagagcattaaaaaataataaatgatgcagtttatcatcacctccctgtaaaacacaaggcacgtgaaggatatgagtttcctttaagctaacgtatttacttaatgtgatttcaaacaaactcctacaaaagtttttggttatggcatccattttggaatttgaaaaatatatataattcatctgaaataaatgtataaaacagctaattttctggtaagatataatatgtgggattatcactactacttttcaaaatgtagtctaaagaatattacttaaatgagctttatgctgagtaaagaatatgggggaaaaaaccctaagagtataaaagcccagaaagagcctcttctacgtatgagagtgtatgtatgatatactatattaatatatgtattgtttaatataacctattttgataaataatagtataatagactatattatatactattatataatatagggaggaaagtaccattaaataaaagatactggagcaactggataactatttgaaaaacaataaacttagaccatttgttgcactatacaccaaaataaatttcatatagattttaaggttaagtgggaacaaaaagatatcacacacaaaaaactgtatctgaaagtaaatatgttctccttatagtagagtgaaggaaatcagttaaagcattcaaataaagagaaaaatgtaaagagaaacattagtatatttgctatataaatggtaaacgttttatatgtcaaaaatcatttgtatattaaatatttatattaatctgtcatatgtggtagatgattaatatacctagcatataacatgctcatataaataataaaaaaatcataasagaaaacaagacaaaagccrtatatgtagataattcatcaaatggaaaattataaataagcaaattttgaaggaaaataaaataatatgttctatgattaaagtggtcaatgtcttttaaaggctaatattaatagctgacttgtggtctgtaaagaatagtttatttaacatgtgacttataaaaatatataacacttttggacagcatttttagagataaatattccacactttttgtagcattgattaactttattcacatcttaaatacttataaaaatctgaatactactttatttcaatgttatttaaattggtgtcaagttctggctaatctacctaccgaatagtaagaatattgttatgcagatcattgttattctataaaatgcagtaccattcagtcattcaaaaatacatttccaaaaaatgtttagagaaaatgctaaaattatgctaagtgaaaattcagacaatatttaaaattttaatagtctgacagattctgatatagataaacagaaagaaagaaaggtaatgtaattttcatgtaattgtacccawgtatatggggaaaaaaggcttgaaggcagtatacaacaaaatgttaaggacttgttatttgcatctactatttcaagaattccttctgaatataaccaacagtttatgcacaaagaatttaattgcaatattcttaataacggtgaaagtcaaatattcatcaataggtaagtgtttaaattacattatcaaatactcrgatgatakaattctatgcaggcattataattatgtctttgaagtgtttctgttttaataatatgtaaaagtgcttatgatataatgctaagtaattaaaccatatgaatgtatgttaaaaggctgcatgaaaatatggtaaattgtttgcataggttatcattgagtagtgaaatcataattgctatttctttcttttttctttttttttttttttgagatggagtctcgctctgtcgcccaggctggagtgcagtggtgcgatcttggctcactgcgagctccgcctccygggttcacgccattctcctgcctcagcctcctgagtagctgggactacaggtgcccaccaccacgcccggctaattttttgtatttttagtagagacggagtttcactgtgttagccgggatggtctcgatctcctgacctcgtgatccgcctgcctaagcctgccaaagtgctgggattacaggcgtgagccaccgcacccggcccataattactatttctttcattatgttctggacactccaaattttcaactacagggtccagcctttgcaatcaggaaaaaaaaagtgtttaaaaacatctctgaggacttacatataacaccagaaggatttatacatttatttagttaatgtggttaataaaaccaaaatattctttaaaccatgtcttagcttcattcttgtctgcaatactttggcactgcctggatttggcatcatgaactgctgcaactaaaataacagtaaggtgcatttatacaaaggaagaaatgagagattaaggtcccctgttaatactaaggagcctgatagattttgatatgttttgtgcactggtatctgtattttcattttattgatttttttctaaggaccttacagctaaagccaggtccccaaagaagtcaggggtttttgtgttacccacaacttggcagaatgtctgcaattactccttctgcttttaactgactttgaatcctctccttttggcttgagtacctggctttcagccaggagaagggaaaatactctatctgttggttttcaaatgtcatttcccctttggctttgttgatggtaaaattctgcctttgcatctgaaattggaaactcttctaatcctggagtctgagtgtaattaatcggaaggctttctcttatctgtgtctaggatcagcctttagtctgatcttcatttttatccaggtgcaaaactcaaatacttttacctttagtgcagtggcccaaattttgtccctagttctgcytgtgctatcattaactgtcattttttaattatatctacacacgaatgtgggccagaggcagcaagatctggattttctcttcctctctgagtccctgacccttggattgttcttccttcttttcaattttggtgggttctgggtttagatttgtagcctaacctagtcaacaacttctttggcatagaaaagaattatttctgatgtgtatattttcccagaagttagaatacccctttgatatatttatttgtgtttaatccacagaaagaatgaagaattaagttatattaacaagagtatcttgcagtatatatatgctttaaagttcacagtgactttgacatgcctctttcatttagttwtcacaactcttggaacgtgtttttgcccattttctgcataagaaaactgaatttcagtaaaattaaattgtttttcccaggcaacccagccaggaatcactagtccccctctctcaaaatccagcatttgctcactagaccagagctgctttaaatgacaatagtgtatggaattcattatagtagaatccattctaaacacattgttaatggtttgatcaaacatctttagtagcaccttttcattcatgttttattatgtatgtgtgctacccactttctgtgcagaaatttcaaggaaaaggaaattaggctttctgtaatactcctaatccctgtccttaataagtccaaactctttaacatgatacataagactttcactatccggggaccccagggtactgcaccattctcatccatgtttctcacctctaagcttgtgatactcctgtcatgcagcattttcctttgttgtccaaacgtgtcctgctttaaatgttaccattctcaattctcatctgcctggtgaccttgtgtttcagtggttgtctggagcgttagtgttcattagaataacctggagggtttgttaagacatagcttcttggacgcccacttccaggtttctgattcagttgatctgggccctgaagttgcctttctaacaagtttccatgtggtcctcttgctgctggtctggcatcacactttaagaagtattattctacttatccttcaagacctcaacctaattgatctacagatccttttccaactataggaatatttaattgcttgttactctatgctttcaagctcttgtttgtgtaacatctcacattttttggtgactatttatgagtgtcttctttgcttaactgtcttccttttacaagggaaaagacttgtttgacttgtgtttagatcctcatgggctaacatgatgggaactcatgaagaatttgtatgaataaataatgaacctggaaacctttgttcatttaaagttgcttgtacaggatgaatgttttgcttcattggtttccattattattgtcttcgttcccattcaaattctgtttctaggcaaactggaagaggaaaactatgtaaactgaaaatacaattctaagcctcccaaccatctgagtggaccccttctctcaaccaagggcattccaaagttaacctgaaaaactagttcaggccatgataggatgggggagtaggacatgcctcaatattccctcctcccttctggaactcaggcacagctgaccagtattaacattaaaatagattttaagactgacaaggcagactgtttatagcaataagataccacattccagcctgaatctagtatagtatcacctgacagatagcagaccctgaaagaaatcaaagtattttatctcaaattatggttttttgccatatcttggaatagtcctgcaaatctgtctctcatgaggaaaatccacattctgaagagaatccctttccttttccaggcctctttcctgatccagaagaaaatcaactctgataagaaacatttacaatctattctctctgaagcctgctacctggaggcttcttctgcataatgggaaccctggtttccacaaccccttatcttgacccagacattcccttctattcattctaggtctttagactataacttgactctttcatccaattagaaaatctttgaagctgtccgggcatagtggctcatgcctgtaatcccagcactttgggaggctgaggcgggcagatcacccgaggtcaggagttcgagacaagcctggccaacatgttgaaaccctatttctactaaaaatacaaaaaaaaaatgagctaggcgtggtggtgggtgcctgtaatctcagctactttgaaggctaaggcagaatcacttgaaccccggagacagaggttgcaatgagccgagatcgcaccattgcactccagcctgggtgacaagagtgaaattctatctcaaaaaaaaaaaaaaaaaagagagagaaggaaagaaaatcttagaagcccctcacaccttgccacttcaaattgtccccccttttcaaatcaaaccaatatacatcttacatatattgattgatgtcttatatctccctaaaatgtgtaaaaccaagttgtaacccaaccatgtaaggcacatgttcttaagatctcttgagggatgtgtctcaggctactggtcattcacatttggctcagtctaaatctcttcaaatattaagagtttgactctttgacaactaatacatatatattttaataaccactatgtgccaggaactgtgcttcatatatattattgtgtaattctcaragtaattcccatgacataactatagtacatctgttttaaagatagagaaactgaggctcaaaaagactaagtattttgtaaatattctaagactggaaataatatttgatttcaagattttcttattccaaaatgtgttctgatctgctgctctaccccatctctactaaaaatacaaaaattagctgggtgcagtggtgcacacctgtaatcccagctacttgggatactgaggtaggagaatcacttgaattcaggaggcagaggttgcagtgagctgagattgcaccactgccctccagcctgggtgacagagcaaaaatctgtctcaaaaataaataaatacgtaaatataaaattaaattaactcttgcttgtctcatgacaggtaaagatgatgggacagtggctgcctatcttcagataaaataaaggtaatctccacattaacattactagcagtggttcctgctctcttctttcttttttttctttgcatccagattcaattcctaaattactcccagtatgacagtgatttctactgtgtttctccttcactctctgcagatcattgaagaggtagctgcaaatgcctttcacttgcatggcttttccaaaatgtattcagattggctgaatttctgaatcaaatacaatttattttctctcttatcctagcagaagatttaagcaaagagatatgtaaaatatattaaaaaatttttaagtttccttttttttttttgaggcagggtcttgctctgtctcccaggctggactgcagtgatgtgaacatagctcactgcagcctcaacctcctgggctcaagtgatcctcctgccttggcctcccaaagtgctgggactacaggtgtgaatcactgtgcccagcttatttattctttctttttttttgtacccattaactatcctacctctctttgtcccaactgcccttttcagcctcttgtaaccatccttctattccctattctcatgagttcaatcattttgatgtttagatcaatatgggacttatatttttaagcattttgatttaattttcatcckttggccaagcttggtgttctgcatttgcaaattttgttagggtacagggtagtcatggctgcaatctggagaaaataatattcaagatagtgttccaggacttattattatcatttcttactggtccattggctgagttggaataccagctaatttattagatataccctatgcttccattgtgcaaacctcagcctatacttggctacattctcttgtaaacattttcaagctttttaaaaaaattccaaggttaaatttgagttgtagaaaagaaatatgaataatggccatcataattattccattataaaaacacatacacacactcaataaaatgtgttgttttaaaattattaccctaaggcaagtggtgaatagatccaataaaaataaaagaaatagaatgaataagaagataataagacgaatggaagactacattctttctactgactggtcatcggtttttctaaatcttggtcctttatctccaatgggtctttgaggacaagcacatcttatgtactttgtaaatatttgctgtttatgcacattttgagtatcattgtttagctttgcttttcagatgcatgaaacaagtamatttgaggcagcaaatgagtaatttgtaaatctagacacaatgagaaggcaattaagaatgctgcttgatgaaaaagaataagagaataatgttgtaggtaagggacaaactaatttcactaatagtggctttatatacagtccagtatgtgaaaatacttaagtaattaacattaacattcacactgtcatcctaggtagtgataagatactggcgaccacacacaaaaatggaatagatatctgtgtctgtaaaactaaaaactcttcaagggagaaaaagctctagtgaaaaatggaattcaccaggaagtcactcaagagaatgcaagtattaaaagcactttattataagataaggatgtcccattcttaaaataatctcctagggaaggcttcaaggatagcattatactaagtagagaagttgtctgacaaataggtaagtataaaaatcagagaacctacagaaaacaaatcattctttgagttgcatgaactttaggaaagagtctttatcagccatgatcaaataaattggacaggtcatataacaagttagaagttgccaaaatttttttatagaagaaacagatgtcatcttcttttgtaaactacatcctgaacatatcccatcctgactgcttcgtggcgtatataaactcccactccacccccttttccccgtctcaagcaagctgacctaccaagctgtgtatttttaatcactttctatagcaatcaagaatttgccatcagagaaactgcttcactgcgtcttatctttccatgcctgttcttgctaaacagatttaagataagagcaactggcagtaagtgcccttcctgaaaacagaggtcacagatgtttctactgaagcccagtaaatggttttgggagacatttgaaatcttagtcatattcaaatcccaaatacaatttctcttttttttcccagaaatttcaaaggttttagaaatattttctactggaaaggtatctctcattcttactcaaaatttagacactaatgagtagatggcaagtcttgtttataagcattaatcrtgaagatgaacatttataactgaaaaaagatgttcgaattttggggtttgtaaaagaactaggaatggagaacatttagagttcactatgtggtgatattcacaaaagcaaatgatgatataactatgtcacttggaaggagcttcaggcaggttctttctcttctacatgtaacatgtaagcctgttttggggtcattgctgaggaaaactacttcttaagacaattttacgactgcattgtttcaatagtacaccaaactatgttggaaagttatgacctagaatctgaaaaagaaaaaagtgatgaaggaataatgaaaggctgcatgacagaagtatttagtcttcattcctgtgtttgaagcagaaaaaaaggtattgagggctaaccagactctgccttttgctaaattgaagagtatcacatcaaaggccaaagatccattttaacaggtgccttaaaaagttgtactaaatgatctctgtgcccctttggatcatgaattgtctacataactgcacaacgaatgaacgtaagaaaaatgaattggctggtgaagcctgtctggtaaacaatccatgatcctgagggaattgtagttttgcaaaatattcagcaactactttagtttaaatattttatatgactcattgaagctccaggaagatactactttcttctcaatatcagttcctggttattgtcatcattcctttatcagagtttgtttccttgtcaaatgaactcttaatacatgtatctatcactgacaattttgtagaaaggtcattatctgttctgtttcccactccatgaaacggaacttattccattcaacttcgtgtaaagtcttttcaaatgacacaactgtaattaggaaagatgtcaataactatttacagatatttatgttgtattcagaactgtactagttagagtgtgtggtttaaaaatttaaaaaaaaagtgggtgagatggtgagacttaactaccctattmcaccactactaggatggtaagaatttagtaagtaaaccagaaagttattagaaaaacaagtaggagcaaaataagctctgtggcattgaactaagaataaaatgtgaagagaaggggtgagctctattatctacttagggatgccttcagtagaaaatgggacttaaaaatgggcaaaacttaggagggtctttccaggaatgagaatgaacagatcctgggataagttaataaggttggatttattaatcacctgagattctcttttttgattattgggtcatcttgtacacatcaactctgattacaaagtaattagtaatcaataattatttctgcatgtgccactggataaccattcaatacgtaaaaatatttaggtgaaaactttgcttgccaaagtttcaaaagttaaatacttaccaggctattatcactatagaaaacaaaggatgagacgttactatgaaaaggatgggtacaaaagtcatttgaagaagaaacgtactaataaaaatatatttcttaagtactttagtctgcaagtggcataattatttgtgtgcaatatccagaaatacatgcttcttggtgggttttaacagacatatttttacaattaaaaagtatatgcctaatttatgttgtggcagattacatttttcaaagacagttacactgataaatcccaacccacatggccatgttataggtgatgttgacactcctccattgggaggtatggaccagttttagtgactcactttcgtccaatagaacgtaacaggaataatgctacagtccaggtcataaaagggagtagaacttctaccttgttctccctctcatgatgttagaccttggaacacagccacatattgtgagaaagcccaaactaccccatgtagagaaatcacatggaaaggcccacagagagaggaactggggatccagctgatatttagcatcaattgcaaaatgtgagtgaaggaggcttcagatgattctggcctagagccttcaacttttttttttttttttttgagatggaatctcactctgttgcccaggctgaagtgcagtggcgcaatctcggctcactgcaagctctgcctcccgggttcacgccattctcctgcctcagcctcccgagtagctgggactacaggcgtccactaccatgcctggctattttttttgtatttttagtagagacgggatttcattgtgttagccaggttggtcttgatctcctgacctcgtgatcctcctgcctcggcctcccaaagtgttgggattacagacgtgagccaccgcgcccggccgagccttcaacttgattcttccatgagaggccctaaacatcatggcaaagagtctaaccatctccattgtgctctgtctcagttcctgacccacagaatctactagcatagcacctctaagttattgagtaatttttagatagacaataacaagataatatgtcaatctggttttcatatctaaatttatactggctccagatattcacttaagattttatcttggccaggcatggtggatcacgcgtgtaatcccagcccttcgggaggccgaggtgggcagatcacttgaggtcaggagttcaagaccagcctgaccaacatagggaaaccccgtttctactaaaaatacaaaaattagccaggcgtggtgatgtgcgcctgtaatcccagctacttgggaggctgagggaggaggatcatttgaaccctgcagaggatgtggtgagttgagatcacaccactgcactccagcctgggtgacaagaatgaaactctgtctcaaaacaaaaaaaaatttctctctaatatacaaataatatcactttcaaaaatgtatctgctcttctaaaaactcagtttccaaatagtgggctagtcattttgccaaattttagaaaacagttttaaaaaatcacacgtagctccaaatgtggtgcactttccttggttttgttcagtgctcaatacattgatgttgctaaaggccatatcagtgccctccgaccatggaagtttggccataactagttcaagccctgaagaactgaccctgggagtcaatccatatgctgctttgtcccaccaagaagaatctctcttctaagattttgaactaagagattgagagttagagagtagctatcgctgaagctgtcaagatcatctagacttgtaccatctcatgccagtcagatgactgttattaaaaagtcaaaaaataacagatgctggtgaggctacagataaaagagcatacaaattcactgctgcttggaatgtaaattacctcagctactgtggaaagcagttagtcagtttctcaaagaacatttgacctggcaatcctattattaggtatatacccaaaggagtataaatcattctaccataaagacacacgcatgcatatgttcatcgcagcagtgttcacaatagcaaagacatggaatcaacctaaatgctcaccaacagtagactggataaaggaaatgcggtacatatacatcatcaaatactatgcagtcattaaaaagaacaagatcatgcccagtgcaggaacatgtaaggaactggaggccattattctaagcaaactaacactgaaacagaaaaccaaatgctgaatgttcccacttataagttggaggtaaacactgagtacacctggatacaagggaacagtagacactgaggcctactggagggtgggaggaaggtgaggatcaaaaaactacctatcaaatactatgcttatcaactgggtgatgaaataatctgtacaccaaacccccataacatggaatttacctatataacaaacctgcacatgtatccctgaacccaaaataaagtttttttwaaaaaaaataagatcatctagacttgggtaggtggccattgtggacatcatacaagcagaagaagctgatctatggagaagacccataggacagtagtattgagaaagcatagagtcccagagagagacaatccagtttccacagccttgactaatattattgctttataattctgtaaaatttcctctgaagccttccagtaagctccttttccacaaacaagcctgtttgactagcttcttaatattaaaaccaaataatttctcaggtggcaataagggggaagtggagtgcattggtcacacaaaagacaacaacatgaaaatcttaattgttttcagtgtcaaacacttgagtttctggagacaaaactccctcttctaagaaaatcaaactattatacatgataattgtcactttgttagttaagacacatttatacaacattttaagatttggagggtagatactttattaataggtggtatggttctgttcttaagttatgtttctgatttttagatagatcattccctgtttctgtttgtgggaaaaatggctgtctcagtaggctgcattataaactcagttggaaaaaactggtttatttgttgaatgagaacttcatttattttgtgtaaatgagcaccactttttattattcacaggttattgacaagcataatattaagttaagatgcttgacattaaaggattaacatgtacaaatttgaaaaacaacagccgcctagtagacactcagaatttctgttcattgatcaactaagcataatatctctgctctttagcaagtggtttaaaaaattgatggttattagtagtataaatcttggaaaatttgcagagaaaatataatttgtctattctaagtatgttaaatggtttaaatgatatgttaaatagtttaaatgatgaatagcgtgaacaatattagctatactgtattagccattagccttgtaacaaattactcccaaacttaccagcttaaaataacaagcatttattaactcagtttctatgggtcaggaatccaacaacagcttcatggaatgaccccaactcaaggtctcccatgtgactgtcatctagctgttggccaaagctgccattttaaagacatgaatgaaacaggattatccacttccaagctcactgtgtggctgttgtcaggaagctttagctccttaccacgtgggattctccatgtggctatttacgacatggcttccctcagagcatgtgacacaaatgatcagagaaagatctaggtgcatggcctcatctcagaaatgaaaatccttcagttttattgtatcaacacaggtacgatgtaggagggacaatacagtgtgtggaagctggagatggagatccttgggagctgagttggaggctgctaccatagctatatctcttgctagagttcccgattttgcagcctgccatcacctcacctaagactgaacagaatcactgcctagatttacaatatcccagtatattctttttcatgtgcactctcactttacatctcaattttcattccgagcagtacttttaagaaagaattatcttcccctttaatgtgaggaaaaactcccctgtgtataaaaacaaaataatcattcaccatctctttctagtgtgtgacatgcagtgagatttaacttcattgctttgttagaatattctgttctctgtggagggccgtgtttttaaaaaatcactcttcagtttctgctgcaaaaataaaataaaattctctgtgaagtttgtcaagtgaaatggacacaaacatggctcaaagtctagaggaaataaaatgaagccacaatctcagtctatgaaaaagagataagttaggataaaactacagcaaaaaatgtacaggaaaagaatgctgctctttaggagagaaatcagaaaagtcagaagataaaatacagagcaaaaagtttactgatcccaacagagaaacaagaaacctcagagcacttatatgcaaagtatttgcrgtgttttggggcccactgactgtaagggaaaccaggtatacacagctttagggcacaatggagagaaagctcttgatatactctcctgagtctcataaacagcaacatcctccaacgtaaatgacagtgaaagaatatgatgaactcctgatgggtrgatgccacaggaggatccagccttatttttcctcagctctttcctcaaggaaaagactgggaattgataatactaaattgacaagtccaaataagccttcaggcaaagcagatgatccttttttttttttttttttaagtatccaaaccagtctcagatttcttcagccagaaagcatgtttttgcaggctttttacaaatcctaagcaaagttatgtagttctcgagagttatagaaaaccaggtttgcatcttggctctgatacccctccctgtgatactttagaaggcttacctggcctctaaaaacctccatcttctcatatgtaaaacacaaaaaaccctgacacatagtatgtgctttgtaaactgtagctcttgttaatagtgaataggttttgtttgtttgtttttcccaaaagaatttgatgcttgtgttttgaggagttaaaattctcaatgtaatagaagactctataataaacttacgtcttcttagggtgatacgaaaattattaaactcaatccccctttagttgcaaacaatcaatactcaataatttttttgaattgatgaacctctgattgtgtgcractatcttaattatgtctatattcttggtcttgtgatgaaaagtatccagaaaatgtctactattcatcactgtatgccttcttctttttagcacagagctttgtacatacgaagttctcaactaatgtctgttaatttaaattgaagaagctttagggagttactacaatttaggtctggaactcacatcccattttccttcttttgtcccacccctacccatttcagccatgcatatgtgtatttggagccctggatcttcaaaaaggcagcaaggagctaattaagccattaatgaattaactttattttttgaagtttataacttatttagacttagtgatctttctttgctcattaacacctctccctgtaggcagagagaaaaaagattaaaatgtgactctgtgaattcttaggcccatataaattcctaagtacaggggaaaagcatcgatttgtaagtcaacatgacattagtcagaagtgttggtttttctttatctgcaggatctgtttccaaacatatttgatacccaggacttgaaactacatcaattatttgaggaatcttgttagggctccatttgtatggagaggtaacactcactggtggcagtggtttgtgggtagaaggggccttcgggtatgtgcggcaaccttgtcaccagaagctgacaccaacaatacacactcacatttaaaaaatgccaaaattgtatccatcacctccaaaattttccttatgtgaaaggttttggcaaatccttgccagattttaaatgattcattctacatttgtatttcacagttataaagcagaactttgcacaacaagttaacttgccaaaatattatgtaaatattgccaaaatattatatcatcaaaatattgtataatatctgtgtattactttttgtattatatatttgtattacataatttgtgtatttatttgctgcttatttaatttataaacataacagaaatataagggaaaaaaagccagataaattttccagaatagatgagaaatggagaaatctgagtccttccttcaagttcattgattatgagttgagtaaccatgatatgctagtatcttttcaaatatataattttttgattatataaagataaggttgatcttcatctcagacaattttccagcctagtagaaacaataaacacagttggattgtaacccaaacttcaactgtaggtcatctcacctaagttagtggatatttggtataatgtttagtaaaaagytacactttgtggcccttcatcatagcaaatattggctttattggcctttaatatcccaaataagaattatcaagaaaataggctccattttcattattaagtatttcagagaaataaaacaataatactgccttaccattgtaggtcattttatagtttccaagggttttcaactatatctttttttaaaaatttgaactttataacatccctttacagagaagacattttacagaggaagacactgagcatcagggacattcagtgactgctggctggtaggcagcagaggtcttgaccagacccctggcttaatcttcagagttcttccatgctgatgcatggaagacttgcccaaggaagttgtctccatatgaaacagccttgaaaataagatgactttcagtctagtttgatcaacatttatgtaaacatgtaattaaaaattgtttgcttcaactcaacagtatgtctctgaatgggaactggttctttctcaggaatattcttggctgaatgtgtctgtgctgtgtcatatgcctcctctttacatatgactgtgggagggtgtggctgtttctataaacactgaaaacagacctgtggctaacaaaggattgtgggtggcagttgcttttagaaaccttggtgaaacttttcaaaagaatgtttcctatcaagcggtgcgttgtacatgtgggagaatccctgacagcacgttgctcttcctggagctccgtgagcatttattcccagtaatgtcctttggtgcttctttccttcatcccttaaygaacctaatccactctagccactcttcgtgatgtgaggtcaagagggtgaacayggcagatgtggcatttatgcgattacattctggtggaagaaaatgggccattaaaatgcaaaccaaaaatcaatgatctgattaattgcagattgtgataactgtaagaaagaaacagagtgccctgataaaaattaagtacgctgacttatttccatagggtttctgagaagatcttcactctggggaracaatatttaagctgcgagctaaaggatgacgatgacacataggaaagaatgttccaggctacaagaccaatcagaacagaagccatgaggcgggaagaagctacatgtctctaacttctagtcagtatgaccagagtgtagattgagacagacatgcagcatagaatggaatgagatgaaaatggagacagaggcgggatctagaatatgctatatcttgagtcttctaaaatgtgtccagcgtctgttctcagtgcaacaataaactatcaaagagttttaagcagggctatgagtttatctgacatctgttttaagaggtcattctattttatatgagtggaagagacatgaaaaagaccagttagaaggctaccagaacagtccagcagagagatgatgttgggagcaaataaagaattccactgtggaaatgtcacatttgagatgcccaagagacatctcagtagaagatttcaagcatccattgtatataaaaggctagagctcaaaggagaagtctgggtcagagatagatatttcagagttttgaacatatatgtgatacgtaaacaggaatacagattaagaataggggataggatcaaaccttgagaaattcgaatttttaagataagatatggaataaaaagataaaactgtgaaggaaagtcagcaatgtgaagggaagagcaagagtgtggagttgtcaaagagaagaggatctcttgagaagaaaggagtgtttgatttgaatgctgctgagaagtcaatacaaagaaggcaggttttacaacaggaccagcctcataattagtgcatctttcaaggagtgtgaagtactttcttcactgatttctgacattccgatttgtcttactttacttcattgcaccaggaggaatttgaagatccatccaagttgtcagccatgaaaacaaaagtgcagcacgtgagccccagctgtgctcctacctccttggtttggtttccatgagtagttaagcttagaaaaattgtgaagaaacttgttgtgtgggagcgatttttcaaagacctacaaacagaagtaccacttgacccagcaatcctaaacttgtatatatacccaaaagaatatgaatcattctatcataaagacaaatgcatgtgtatgtttattgcagcactattcagaacagcaaagatgtggaatcaatctaaatgctcaccaaccgtagactggataaagaaaatgtggtacatatacactactgaatactgtgcagctgtaaaaaagaacaggatcatctccttggcaggaacatggatggagctggaggccattgaccttaccaaactattgcaggaacagaaaactaaatacctcatgttctcacttataagtgggagcgaaatgatgagaccacatgggcacatagaggggagcaacagactctgggtcttaccagatggaggagggagagaatcaagcaaaataactaatgggtactaggcttaatacattgggtgacaaaataatctgtacaatgaaaccccatgacatgagtttacctaaacaacaaacctgcacatgtacctctgaacttaaaaaagaaactttttctgtatcttaggatcatgagaaagaatcacgttcaaagagtaacaaaattgatattatatttagacagggaatgggattgcaagtgaagaatctgtggaatctcttgatttgtgaagatttcttttagagttcagtaatggatctgtgacatccaatttttctagttaaagagaaagagcattgaactaagaatcagagacttggtttgcagtcccggattcattggttattggttgcttaaacttgggcatgtcacttaaccattctgacccctaatttccttatctgaaaatggtaaaaatcatacctacctgatagacttgttgtgagtgttaaaatgatgtggcttaaaacctagaggaggcattcaattaatgataccttatttttattaatattagcatattgggagtaagcacagggccaaatgcaatcatgtatagaaaagcattccgctaactataaaacattgaataaaatgcgctgatgtgtttatgattgataactgttttttgtcagctttttaattttagctgcaccatcttactttttggtacagatctatttactatctaggagttgtgggggacttggtgggtagccagaaaagatgacagctagcagagcttaggcacaggagcagatgtaagtgcaggtggctggcagtgtggggaccctggargcagctgctctcagggtaaaatccacgggaggactaggcagggtgagagagcatccccaggcaaagtagagtgacctgcctctgagagtttgggtgtagaatgcagcaggatgactcagaaaagtctgcagagctttagaaawgcttttttttttttttttttttttgatgtggtgtaaggttagaagactagaatgacgtttgtctattattcaggagatgttctttgtaggagaaagaaagggaaaaagaaaaagattccaaatattttagtgggcattatgtagttccgtctcttgctccttcccttaattccccctccagaggggaaacagatatctgtgaaactgaaaagcttgcatctttgtgagatctgctggagggaagctaccgtttaaacccagtctccattattttaaatggttttaagcctcacatgtagtgctatttatttttccttctaaaaaayatttctgggttatgcctccatatacaaaactcacctttgtgccattgtgctgttttgatgataggtaatttagctagatttagctaccatctattgagcacttaaaattaatctctgtaataaactctattcaggcatttcatcatttaatttaatacaaaccctgtagaaagtggatatcactcctcttttgctaattgggcactgaggtttaaagaggttaagttaatttctcagtttgctatagctagaatggaataggtccattatttcaatataggtttgccagactccaaagcatgtactggaactactgtggtataaaacaatatccactccttagaaagatcagcatattcatcttctatgtcctatttataagtgaaccggtgtgctcttccctctttattgagatttttttcaaagtaggaaaaagggaaggaaaaagcatttattgaccacatgccatatgccatatttctttacaaatattttcccatcattcttagaaataaaccccaaatgaatatttttgtccatgtctttcaaatgaggagattgcttagagaagttgaggagttcgtcaaaatccaccatgcttatttattttcttttcatcttacatttttacatatctagtgattgtcagatactgagttatccagggttaaacagaagttacagtctgtgttaccaagggcctcgtagattactggagaagacaaagatgcaaataggcaattataataaaaaatgctacacagacagacaggaatatattcaagtcactcttaggcgcttctcctcccaaaacttaatcccccacttccattacgccatggtgccttccagaattagcgcagttygcatactgaaggaaactgaggggtggtcagaaacccagtttgtgcaggaaaaaaaattgtggagawcaaaattagcttcagtttttaatatcagccattaattctgaggaacaacttcatccacttaacttgattttccatcttccttgagtcccaaggcaaaactgaaatggaaaagaatctacaggatgctttcatttagcaaagaggcaaacaaacccaaatcgagcagtacatcatagcaacccactaattggaagtctgggtaaaacatctctcatcccatttctaagaacttagctatttatccaaagcaagacctcttgccccctggagctctattccccaaagagaagacttctttaaagagatcgtccttcttagaaaaggagatttttctttcccattcagatatttctagattggttcacgtggatagagaattctatgccttttttagccactgtgactcagatataattcattttgccttaaaacgcaaagcatcagtaaacattgttagcattgttatgtcacccttttttttttttggttgttcacaaattttctttgttaaaatcctgtgcagctttttgaattcacactaaagaactttaaatttccaaatgaagaaatttcctggccagtttttggttttttttttttgaagatgactgctgcctgagtgtcaacatttgagaaaatatagaatttaatttttggaagtcactagatatagcaacctgcctggtgccagagaagagctgtctatgctgtactgcaatttgacttttaatccatcgtagatctgctaatggtatggcacatgtgaagtggtaaattcttgagtgtttgagacaaacattttaaggtacccatacataatgttaagttcacgtttaggaaagtagtaccagttaataagattacttatttgaaaataagaccagtttatttcaatctggatattcgaattatcaaataatctttttttttcaggattttcttggtgtatgttacctttttagtgaaggaccagtgtctcagagctttattttttatggtagtttaattatttaactgaaacctggaagaattaatagggtcagaattttagatcatgaaacatattttattgctcagtggatgatattcttcttggtattatttgctcttccccagagtcaccatatggtataaattattttaaattcccacaattatcagttatgtatatactaataatatcaaaatcatttgtttgggacattttttgtaatttattgaattttcaaagtcaattttgttcagaccattttttttttacaaagtagcttaaaggcacttagaaactgacagtattggatatttcatacgattttttagaattgcagtatctgccatttatctgaggactggtgattcaaaaactctgtttttggttaattttaattaaaaacatgtccactcaaaatactgctcaatacccaaatcattgcctaccttgtatatagttatttttcctaagggcaaaatagctaagaccataaattacgatggcaggcacatggtttgctgacagaactatataaaatactgttttcatcctcatgtcagctctggtacatgcctctttactttaattccttggggaatctgttgtaagttatagttttaaaaaacatccctaccccactagctctgtcagcttacctttttctgactgaccattttatttctctgaaagaacagatagaaactgagttatgtcttagctgaacttgtagtgccctaaatattaatagctgtgaaccagtttagtttaatttggatatttcccaatcttacacctgcgatattgcaaggtagttataaaaagtacacagaattcatctctataaatatatgctcattttatatcctttacaatctgtttcctagattcctaatccaaagaggccattagtaccaatgacatgatggatagagtaggttataatgtttagcagctcattggagatgacatagtttgccaagttaatttacacattttcatactacatatattatgtacaatattttttgtatggtgggttttcatcgagtacccttctctcttgtaagaaattattttttaagaaacatgttaaagagtaaagatgttttaaataagcatttctcaaatggttggtccttactaccaagcatattctggaactgacactttagttttacttacttccagcacatttcatgggaaatggagatgtccaaggaaacaggaagacgttaattgatgatacattttcttctaatattttgatatcccccaaagaaaaaaatagtccaggagatagattatactagaacagtttggctacattatctaaaagtatgttcccatggaaaattatataataggcttagtacattttagaccatttttttcattttctttttttttattattatactttaagttttagggtatatgtgcacaatgtgcaggttagttacgtatgtatacatgtgacatgctggtgcgctgcacccactaactcgtcatctagcattaggtatatctcccaatgctatccctccccctaccccacaacagtccccagagtgtgatgttccccttcctgtgtccctgtgttctcattgttcaattcccacctatgagtgagaatatgcggtgtttggttttttgttcttgcaatagtttactgagaatgatgatttccaatttcatccacgtccctataaaggacatgaactcatccttttttatggctgcatagtaatccatggtgtataggtgccacattttcttaatccagtctatcattgttggacatttgggttggttccaagtctttgctattgtgaatagtgctgcaataaacacatgtgtgcatgtgtctttatagcagcatgatttataatcctttgggtatatacccagtaatgggatggctgggtcaaatggtatttctagttctagatccctgaggaatcgccacactgacttccacaatggttgaactagtttacagtcccaccaacaatgtaaaagtgttcctatttcttcacatcctctccagcacctgttctttcctgactttttaatgattgccattgtaactggtgtgagatggtatctcattgtggttttgatttgcatttctctgatggccagtgatggcaagcattttttcatgtgttttttggctgcataaatgtcttcttttgagaagtgtctgttcatgtccttcgcccactttttgatgtggttgtttgtttttttcttgtaaatttatttgagttcattgtagattctggatattagccctttgtcagatgaataggttgcgaaaattttctcccattttgtaggttgcctgttcactctgacggtagtttcttttgctgtgcagaagctctttagtttaattagatcccatttgtcaattttggcttttgttgacattgcttttggtgttttagacatgaagttcttgcccatgcctatgtcctgaatggtaatgcctaggttttcttctacggtttttatggctttaggtctaacgtttaggtctttaatccatcttgaattgatttttgtataaggtgtaaggaagggatccagtttcagctttctccatatggctagccagttttcccagcaccatttattaaatagggaatcctttccccattgcttgtttttctcaggtttgtcaaagatcagatagttgtagatatgcggcgttatttctgagggctctgttctgttccattggtctatatctctgttttggtaccagtaccatgctgttttggttactgtagccttgtagtatagttggaagtcaggtaacgtgatgcctccagctttgttcttttggcttaggatggacttggcgatgcagactcttttttggttccatatgaactttaaagtagttttttccaattctgtgaagaaagtcattggtatcttgatggggatggcattgaatctataaattaccttgggcagtatggccattttcatgatattgactcttcctacccatgagcatggaatgttcttccatttgtttgtaacctctttaatttcattgagcagtggtttgtagttctccttgaagaggtccttcacatcccttgtaagttggattcctaggtattttattttctctgaagcagttgtgaatgggagttcactcatgatttggctctctgtctgttattggtgtataagaatgcttgtgatttttgtacattgattttgtatcctgagactttgctgaagttgcttatcagcttaaggagattttgggctgagacagtggggttttctagatatacaatcatgtcatctgcaaacagggacaatttgacttcctcttttcctaattgaataccctttatttcctctcctgcctaattgccctagccagaacttccaacagtatgttgaatagtagtggtgagagagggcatccctgtcttgtgcaagttttcaaagggaatgcttccagtttttgcccattcagtatgatattggctgtgggtttgtcatagatagctcttattattttgaaatatgtcccatcgatacctaatttgttgagagtttttagcatgaagagttgttgaattttgtcaaaggccttttctgcatctattgagataatcatgtggtatttgtctttggctctgtttatatgctggattacatttattgatttgcgtgtattgaaccagccttgcatcccagggatgaagcccacttgatcatggtggataagctttttgatgtgctgctggattcgttttgccagtattttattgaggatttttgcatcaatgttcatcaaggatattggtctaaaattctcttttttgtttgtgtctctgtccggctttggtatcaggatgatgttggcctcataaaatgagttagggaggattccctctttttctattaattggaatagtttcagaaggaatggtaccagttcctccttgtacctctggtagaattcggctgtgaatccatctggtcctggactctttttggttggtaagctattgattattgccacaatttcagcttctgttattggtgtattcagagattcaacttcctcctggtttagtcttgggagagtgtatgtgtcgaggaatttatccatttcttctagattttctagtttatttgcatagaggtgtttgtagtattatctgatggtagtttgtatttctgtgggatcagtggtgatatcccctttatcattttttattgcgtctatttgattcttctctctttttttctttattagtcttgctagcagtctatcaattttgttgatcctttcaaaaaaccaggtcctggattcattgatttttttgaagggttttttgtgtctctatttccttccgttctgctctgatcttagttatttcttgccttctgctagcttttgaatgtgttttcatctaaatatttgttatattttttgatgaagggcaaaacattttggttacagtttctttgaatatttcattccacttacgcttttcaaccaaatacaataaaaaaagcaagaaggggttgtcattcttttttttttttcatttgttcttcaatttagcattgaaatattaaatccaaaagacaactacctttagtatgagattgtatattttgaaaatgtgcagaggtttaggtattttataatagtgacaatttacatatttataggaaatatagtttcaaatagattttaaggaggcagctgttaaaatttgacatattactgaaacttaattagtaatatcgaaatatttcagataacacagggatgactgagctaacctgattcaacacatcagttcacaatgttgtgaagaacacattgaacattttcatggaacaatgcattctgctgcttacttcaagaattaggaaggtgaataagatgattcttactctcaaagagcttataatttagtagaagaaagacaataagtctgtgtgcccatacatttattaatacaaggtgggtccgggtcatatcttataatttgtactaagtgtcatggggtagaagagaaaaaaacatttaatgtgatttgaaattgagaatgtttgtgtggatatgtattttatataagatacttataaaaaactaaatgcatcaacccacagattttttgtcttatggcctctgttagaatggtagaatgggaagaactatttgggttgttatatacacaggcctagttattattcccttgagtaaaatagggctttgttacagctaacctaataagaatatttcagtaatcaaatatttaaggaacattgttgaggtggcatggaaagtcaacacaaaaaaggaattccacttgagctgtaattttgttttatttgcttagcgtagattagaattgtgatacttgtactgttagttgcactgtacataaatattttgaattactgtcgctgattggaactaccttcgtgctttaaattaaaaaaaaaagatgtatctgtacattctaaatagtaaaaactctttttggctcaaatcttttaattctgaaggaatatactggcagatacttagtagacataaataatcattaatgcatgtatggtgtatttcattcagtagtaccaaaatctaaaacacattgagttgtctggcatggtttcattgccaaaagttgtgatgtgactctgatgtaacctggtttgttctgaacaactccaaatggttcttcagacttgcccaggatccatctggctcctgggaagccttatgttatcatggctataatcccagactctggtgacagtctgcctgggttcaaatccaggctctggtactcactatctgtatgaccttgaggatgttggtttgtctgtttcccttgcaaaataatgaacattatattccctatctcaaagggttgttgtgaggatactctaagataatgcaggtaaaagtgggatgttaacagcatttggtaagttgtaaggactcaggtgctggctatgtaaaaataaacttttttaagatggatagatacatagatagatagatagataggtagatagatagatagatagatagatagatagatagatagatataaaaacctatacctgaaaacattattttcataatatttcaaaagcttctattgtactatctatgcttttatacatagtaaaagcagatgacatgctggtcctactaaatttacaggttaatttttagatagttactaagaaatcaaactgtgtggaattttctggtacaaaattacaatatgcaataccttcctactgaggtacccattactgaatatttcttttctatcatatgtgaaatgcatcaattttaaatatttggagacatacctaatttaagtgaaaatctcggtatttcctgaaagtcgccacactataacagataaccaatcaaatttgtctagcttataatgtctgtcagcctgggtgatgtggatgggccactgtgttctcaactgcactgtctcagtgattggagccagttcatgaagcgctacagcctgtaggatgccaaggaggttctttttcgtaatcacacacaagcaatgtggtaaaaccctcaagggatagcagttgctttcacaatctatttacacacatacacacacatacacacacacacacacacacacagagttctttgttattttacatctggcaacaggaagagcatgctggacagacctctggcatcataaaccatccttccctctgacctctgtgtgaatcagcagactatgatctctgcagaatttaggattaattgcagcaaagaaaaagaacctctctgaaatctaaaatgtagacttggtcattagttcattttgcatgctgtggaaactatatttggcatcattaacagctgcttccatgagatgttgagcactaaaatatgattggtgaacactcaggattttattttgtggtattggttgcaattatggagatgttgatagatcaatttccacatcatctaaacccttaactaagaaataaagtggtacataatatgcatgtcccctctatatgagactttgttaattttcttaatttaaaaaatttttttaattctatgaaggaaaagaaatttctctttcagctgatgtttccctgaacacacattgtgatcatttactatttcctaagtgattcaagcagcaatcttgttttagaatatttcaactgaaatgccagccctggaatttcagtgctgattttaggaattattctaatgacttcttgacaagctttacctacatcaggagcaagtgaacttggcagagttgggataggagacttgcctccaaaatgttaacttatatataaccaccttgttatcgcattagttgttttcatggtggctgtggtggtcaatagcagaggcaatggaatgagctgtaataagagtcagcaaatctgagtggacttggcttctcccgtttgccatggtgtaaatatccccaccatgattgttttcaggctaccaacatgatgtcactaaatgtggaattgagaagggatgtccaaaatatacatcaataaatcagccctcatttgattttcttctcagtgaactatgtggttaaatgacttttatctacctttatctcgccattagcaggagacattatggaaaaatataatgccataaagtcacctctatgtcattgtccttgttagaataaaaattaagacctctaggtttacttttatgggttgagcctttgacctatctgtggaagtggtaagctggaacaacaaagaggaaaatgagagtctgtgcttttaggcaggtagttaatgaaggaccaggtaggaatgaagaagccaagttctagtccaaattgccattgattatctagaagattttggacaattcacttcatgcagtagctcaacatccatcaaagagtttttgaaagtctattatgtgccaggtgttggaagatgtgaaggtgaacaagcagatgatttcaccttaaaagagcttgtagcttagtgggaaggaggaaaaaaaaggaagtaataataacaaagtaagaaaagagctagcatagagctggggaagcaaaacacacagaatgaaagtggaacctgatcttgcagagtcctggaagggttctgggaagagatgactgtgtgctgagcaaggaagaatgaatagaaagtaggcaagaaggaagggtgagatgagaggcttcttgatttgattccagatctcaggttttatttcaccgttaagtatgatgttttagtctctcttttcttttttagaaaccttcactatgttaaaaaacagtttttttctattttttaattggcaaatagttttttttaaatcacaagtaagtattgtgtaattgtgtcagatttttttctgcacctattaaaataattgtataggttttcctttattctttaatgaggtgatatcatatcaaatattagaccaatattatgtatctgaaaaaatatgcacacacacatataaatgagtgtatttgtgtgtatatgacttttgagaatacattaatgagagagattgtactgtaagttttttctaataatacccttgtgatagcaaggttataatggccacataaaatgcattactaattgctttttatttctctttcttggaagagattgtgtatgattgctgtaatttcttccttacgtatttgggagaattcaccagtgaggccatcttggcctgaatttctattctggaaacgtttaaaattactggttttatttatttaaaagatttagggttcttcagattttacattcttctcatgttaactgtaagttacagtttttctttttttttaatgtgttgttattattttttgtatatgtccatagggtacaagtgcagttttgctacactgatgtattttgcattatggtgaaggcagggccttcagtgcctccatcactggaggaaggcacattgtacccaccaagcaaccttccatcatccactatctcccacccctcacccctctaagtctccattgtccacacattcatgatggacagtgtgcactctgcttccatgtgcacacattatttagctcccatttataagtgagaacatgcagtatgtgtctttccatgtctgaattattacacttaagataatggcctccagctccatctttgttgcaagttggtgtttttcaaaaaatttccttatttgggttgggcacagtggctcacgcctgtagtcccaacactttggtaggccaaggtgggcagatcacaagatcaggagttcgagaccagcctgaccaatatggtgaaaccctgtctctactgaaaaaaaaaaaaatctaaccgggcgtagtggtgcacgcctgtagtcccagttactcaggaggctgaggcaggtcgcttgaacccaggaggcagaggttgcagtgagctgagattgctccactgaactccagcctgggcaatacagggagactccatctcaaaaaaaaaaaaaattgcttatccattttattcaaattgtcaacttcattgacataaagttactgttcttatctttttgacatctgtaggatctctatcaatatcccttttgtttttatacctgatattggtcattcgtgctgtagtttttttcctcaataaggcttgttaagagagttttaattgtattagattttcccaagggcaaattgctggccttgttgatgttctctattgtacacttttttctgttttataaatttgtgccttttttttttcactttttctcatttctatttcctttgggtttgatttttcttttttgactttttgaattagagtatagattattgatattcaactttcttcctttctaatatatgcatgttaggccgtaagtttctctttaatgagtttcagctactttccctaggttttgacatggtattttctatattatttaattcaaaatatattctagcattcattgtaatttttctttaatccaggggttatttaaaaaatatgttgcttaaatttaaatgatttgaagattatgtagttatttttctgtatttgagttctagcttaattctaccgtggtcagagcatatggattgtatgattttggtgctttaaaatgaacttgttttattgcttatcatatggtccaattttgttaaacattcaatttgccctgggaagtaacatgcattttgcttattttaaaagcagtgcattataaatgcaaattaaggcatttatatataatgacatatatatgtgtgtgtgtgtgtatacatatatatgtatacatatatttgcttttgacttgtttcmtcagctactgggagaggtatgtcaaaatctcaaactttggttgtgaatgtactattctttataaaatttaaaactgtgttattaggtctataaacattaagaatgtttgtatatttttggtgtaatgacccttttatcagtatttttttcatatttatctctagaaatgctttgaagcctaatttgttattaatatatcaataattgtatttcaaactagattattcaattcatgtaaacccgatgtagttaatactttatgacaaatttatcgtgcttgagtttggtcaggattctcaattctatatttgatgtcttttatcaagttttgtaaatacttggcctggatatactcaaatatttcttttatctcaatctttatctctccatagcttttgggattctaattacttgtgtcttattcctttatgtcatgtctttatgttcttttctaccatttttatttttttctcaatgttttcatccagaaatttttctgacctattttcttattaattaatcttcttcttctgtgtcaattctgctatgaagcccgtccactaggttttaaattcaattatagaactttctgttcaaaaatttccactttattctttatcattgattttatttcactggtaaaattatctgtctggtcatctttttaaaaagtaatatgaataacagttatttattctaaaatccttatgtaactgtaatatttaaaccatccaccaggtccatttgtgctgagttttctcctggttttcagtcatttgattttgtatgtatgtatgcttggtaattttggattgggtgtcagaaattgtgtatgaataaaatgtaaaggttctggatgatgatctgttatctcagagaggaatgtattttcttcaggaaggaatttaagtacagatagaccagcttgatgcagttagaaagtgagacgattcaaggttttattcctgtcattctgacagcttgttattttcagtttctcctttgtcctaggatacagcccttcagaggtctcaaatgaaagacggggccttttttctttataggtcccaaactccagtttttgtctttcagttccattaaactatggaaagctctgagctactgttttctgttcagcctgtctgccccatcctgcttgtgaataagcagttgcctcaagtgaaataattttcctgctttctggatcttggtctgtcaagttctaactgtcttaatcattcctcagtatcttcaaacatttcccctgcatttatagttgttataagtactagtatgatctaagctattctgttatagctggaagcagaaatgctgccatcgaaagagattaggcattggaataatgtgatctgatttgcattttaaaaagatttttctgaacaacaatatcctcatatgtgcaatgaaacattttgataaaaattgttctctcaggcccttttcagctccaatattctgcaagtcttgagagtactaatagtgtgtcataccatgatttcaagctgtcaaaaccccagggcttttagttttagtaggctaaagttagaaaagcttagactctggggaaaatggccaagaagaagactctcatctttggtgtctttctatgtggcttcatcactgtacttcttgttagctttcagcaacatcctctcttttctgggtcttggtatctgggcacctagactatttttccagtaacctgaccactctctcctcatgtggtggtgccccattccacactctcttctaaaatgtttcatacttgagatttaaaattcactgtccatcctgcatttttctgattttttttagtaataaattaacatttattgggtagttatgtgccagacactgtgctaaacacttagatggaatattttattccatattagctctatgaggtagggacaattattatccccatttacagatgacaaaattgaaagttaggggagtcatgtagcttacctaatgttacagaggtaaagtggctgagatgaattctgatccctggaatgggcatcatttagaggggtggttcccaaaagccagtccacagactgtcttgttctctaatatataaaaaataattcagcaacatctaggagcataaatccagagattctgaatcagtagttcttggatggggcccagaaatctgaatttttttttccttttcaatgattacattttagtttactgtacaatgaaacagagaaaactactttttttttttttttttttttttttttgagacggagtctcgctctgtcgcccaggctggagtgcagtggcgggatctcggctcactgcaagctccgcctccggggttcacgccattctcctgcctcagcctcccaagtagctgggactacaggcgcccgccactacgcccggctaattttttgtatttttagtagagacggggtttcaccgttttagccgggatggtctcgatctcctgacctcgtgatccgcccgcctcggcctcccaaagtgctgggattacaggcgtgagccaccgcgcccggcctacttttttttttaaagatctgagagtgtgaatcttccacctccttttcaaccaaagttgaggaatttgtcctgctataatctcaacccttgagtatttctttttttaaaaaattttattattattattattataatactttaagttttagggtacctgtgcacaacgtgcaggtttgttacatttgtatacatgtgccatgttggtgtgtgcacccattaactcgtcattcagcattaggtatatttaaaaaaaaaaaaaaaaccttgttatctcagtatgtttttattatgcaaatttcctctaaataatgaaagctcctttttaatgttatattatgatagcaaaaggtgtgctctttgtagagttagcaggatatggttgtgtgacaaaaagccaaatagtattttaggctccaatgaagaggaatatctgtgaagggggtctttcttggtatttttgaagttccacttgaaagtgctgttggccatcactaatcatgagggaaatgcaaattaaaatcacaatgacataccaccttaccccccagccagaatggcgattagtgaaaagtcaaaaaacatagattttggcatggatgtggtaaaaaaaaaaaaaaaaaaaaaaaaaagatgtttatacactgctggtgggaatgtaaattagtacaatctctatggaaaacaatatggggatttctcaaagaactaaagacagatcaaccattctatccgacaatcccactacttggtatctacccaaagggaaggaagttgctttatcaaaaagacacctgaatgtgtatagaatcatcctaagtgcccatctactgatgagtggataaagaaaatgtggtgcgtgcatgtgtgtgtgtgtataccatgaaatactatatatatatatacacacacacacacacacacaccatgaaatactattcagccatttaaaaagaatgaaataatatcttttgcagcaatttggatagaactagaggccattattctaaataaagtatttcaggaatcaaaaatcagataacacatgttcttacttatgaatgagagctataggtatttaaaggcatccagggtggtataacggacattggagactaagaagcggggaggctgggagtgagggtgagagagaaataactatgcattgggtacaatgtacactacttgggtaataggtacactaaaatcctaagcttcaccaccatacaattcatctctgtaaccagaagccacttgtatccctaaagctattgaaataaaaaaaatcacaaagtgctgttgcctactccacagccatgcaagtttgattctggatctgagacaagctatgatcacattgttgtagagaactgaggtccttggaaaataaaacacaggttcccaaccagaagttaattttattctgctgttaaaatggaactatgactttkcttatttataagaactgtccttcctttttaaggttaaaacatgttattttattataatgcaaataatattcattatttaaaaatagaaaaataagaggcagatgtagttctagctcttaataaacctggctaaacttttacaaatttcatctgatcatttatatacttttctacatgattggacttatttataatttggatttttgaatagtgctttaacattttttacttaaattgtatacattttatagattatctcttgataagcattattttaatgatatatatgtataaataatatatattcttacataatacacacacatgtctatgtaatgacatatatataatattttgcaatggtgcatatgtgcttgttcccttaagatggatatttatttgactgttttcttattgttggattattttgtttcataaataacattctatgctgaaaatatttttaattgctataaattgcccaactaagacatataacttcctgttatcctttcactacctttgataacacactaaatttttctttactatatttcattcccttcttaatctcatttctaaaaactgtatttctgtcttacaatatatatatcattccttcagtactcctacctgttgatcttctcattgttatttactggcttgtcaggtcttggaagataggcttctcatacaacccaagcctstcttttgacctgactataaatattttattgtttacatcttcccctgcaaagaattcctctaggatctgcccctttcttgttctccaggcagtatgccttggacattctgtagctggctgggactgattccttgccaggtcagtaggacagatgtgtagactaagaaattaactagtgagttcaagtggaggttcctggcctgttggtgcctgtgaacaggattcttttgagtatgattagtgacatgaaggtcctgaataatatcgtaggcagaagaagtgccattactactcacagtgtaagaagtagcttgagttaactggtgaaagagctaaaagtcaatgaaaagtattgaacttttaaaatgtattatctattgaaaagtttaaaagatcatttattgattaaggaaattcctttgactttaatagctgtgagctctaatgggggctagaaactccagcaagtggtacagtttctagaacctagcagataatttttcattgactagaattccatgtgtgatacaatgatttggcaaagtaaatcacaataattattatgttcattgttttctcctttgtttaccttgattaaccatctttggtgattgtttcataattgttgctttctaaacaactttattgaagagctacaaatggctagctcttctcaaccctttaattagtgtctgggatcggtggatgttagttgaggggaaaaggttattttaataatttaagacaaaacaatttagaaattgtatttttttgaagacaacttgctatgtaaccttttataattccctgaatttttctgaaattgatgttttctttagtgtatagcagtgatagcatgaaaccaccactgacttttttagggcaacttgctggctaattttataaaatttgaactgcactatatgaatgaagaatcatctgtagcaattgctcttttccaaatgttcttttgcttcaaatgccgtatctgaatattagattgtttctccagatgttacaggctcatgtttccttctgctgaattcaattgttggttcctgcttatgtttctcaggatttgtatcatttctctgtcttaagtaaggtttttataaatgctcatcaatgttgtagagtttggattcaattcagatagaggctatttccaccggacttttgctcatctacttcctccctggagaatggtgaaaaacagtcctcttttccctcctctgatagggtgatgggctactattgctttctctctcctaatatattgagtacaccgacctctcaccgaaaccttaggtcaaagtgagaagaggtgattgtttttaattggatgattgctaccatatacttctcttttggtgggatcccaaaataaataaataaataaatgacactccccccaaaaaagaggaactaaaaaaaggctgagaaagcatgccatgaaggtccaggcttggacaacaagcataccatgatgtgaattttagccccatcacctactaactgtgtgaccttgggcaagcttttgaactcaccagggcctcaatttcctaacctataaaatttttgtgatcattattataattacaactaagaataagtaycttatcrttttgctgcaatacacgcgtgataattgtcctaaagtgcttagcatggtgtctagaacgyattatgtacttaataattattgtctgaaaaaataaacacatgaagaaaataccttattgtcaaagaatataatactgtgccccaacttgtgaaagattaaacctcttgtgtctccaggatttctaatagcttatcccagaaaggcagtgcagaggacatgtgggctctcttcctactgcagactcrggctrttctgatggtggggtccaagggcagccttgcttctgccatttgctcagttgatcttgtgaacagctgcggttcttgctgtaactacttgctcgctctcagtgactctgtactgtaaatgtttcatgtgaagragcactgctctaaaacaaagctggaaracagggaggcaattgccagagctgtcattgtgctgagtcagggaaggcttcagcaatcatccaaagagatgtggcatttacacctgcagctggatgggttatgaacccaaataggtccttaaaaaggaaggctcatctcctttccccccaacagccccccacccactcaatttttgcctactttaagggaaggtttttggtaactaatttttcatctgctcattaragcttaccaattacagcatgtgttacaaattataggttccaggactttgggtgaaatrtgcttcgtaaataatggcatattttgctgtgagcagtccttgattttggactcttgcattacctttcatctcgcaaattttccgtataggaatacttggatgtacaaatttcaggcaagtatccgatgtatcttatagaatcagctacccgacaatattgtcaaaaagagaagcaacgctttcagatgatgtaagcatagaatcaagcaaggagttggttgaatccttcttgtgcttttcctttgagatcaccttatttcagaatcctaggaggattgaaacattcctactttgatattttcctctggagatcacttgttaaaagtcgtcaggagtgacatttactagtcttgtattttctctggtcttaacttgaaaagttctgctcatcaaaaatgagtatgttgagatgatattttctatagaaattttgtattttacccccttaaaatcctcacttttcacatgaaagtgtatgctcagataaaacaagactcatggagagcacatgggtgagatcatgctaggctctcattgctaggctgagatttgcatttttctgaaaatcagagtgctgaattttcttagctttgaagtagctaatgggacagtgtgtgtatatgtgtgtgtgcccacttgcatataattccgaatyacttgtttatgtgtagtatatgattctatgacaaagagctccctttaatgcaaatrtaaggcattcatgagcatctcatgtataagctcatattttgaactttgtttttcttttactcaaagaatttacaaaatcattttgtggtttgaaaagtaattcagatttcctataaaatgttatataaaattttaaatttagattttagctagcaagtattggcttaactgtagaaagaacttcattttctaggaccattcaatagtctagcttctgctttatgacaatctactcgtgttttttaaaggataataatattaaaacatttttataaatctcacaataatgctttatgtatattaactcatttggtccccacaataaccctgatggatgtcattattattatcctcgttttttttttttgagacagagtttcactcttcttgcctaagttggagtgcagtggcaccatctcggctcactgcaatctctgcctcctgggttcaagtgactctcctgcctcagcctcccgagtagctgggattacaggcgtgtgccaccacacctgtctaattttttgtatgtttagtagaaatggggtttcatcatgttatccaggctggtctcgaacccctgacctcaggtgatccactcgcctcagccttccaaagtgctgggattacaggcgtgagccactgcacccagcctattatcttcattttaaatatgaggaaactgagacacagagagagaatatacattaagatcagaaagctagaaagtctaggaactaagattcagaacaaaatcatctgattccactctctgtgctcttaaatacttcactagaataagtcttattttttataattgatacaactggtctaaatattaatgaagttttaagattcaatttacatatagcttctgtctctgtaagttaccagttattactacctaaaatacacttgkagtcaatagtaacattgaatattcctagattttattttwtaataccaaccagaataggaggcctcaaaayacctgtgatggaaaaaatgcagtgcctgagtgcatgcagctaagcctgatcactagaatacatttcatttatattttataagataccaaagacttcagaactacaaagagaactatagttgctgcaaccagaaacctattcacatatacgtacttttataaatcatgtgcatatgtgtgtgggtacctycatgtgtgtgcatatataaatacatctaaaagctgagaaccaccttagtctggggcattaaaattttagtaaacttttttgatgtatatgttgaataagttgcaaagttgaagtctgttccctgcctccatgtggcttacgtacacttgctaatgagaaaggagcttattacaaatattcatagatgtgatatatatgtgtacatgtgtgtatatatatgtgtgtgtatatatacatatatatgtgtgtgtatatatacatatatatatctttctccccctacacacacatacacacacccctttattcgctctcttttttttttttttttttttttttttagttggagtctcactcttgttacccaggctagartgcaatggtgcaatcttggctcactgcaacctctacctcccgggttcaagcgattcccctgcctcagcctcccaagtagctgggattactttctactatacaaattttactgtcatagacattggcttttgtacctccaaaatgtttgttattatccacggaaagggtacccacattttacttctatggataaattacacatatattgactgatagctactatttaatgaaactttttttgtgtttcagggtctcaactctatctttctatctatctacttatctacctacctatctatttttttctcaattaattccagaatgttaaatttcatgatggcaaaagtcattattaattttgttcactgacatactaagcacttaaaatgctgcctggcacatgtagagactcagaatatgctttcagaattgaatgaaaatatcttgacaaggtagcacagtttttgcttttgtttttgttttaatagagtcagggtattgctctgtcaccccacccaggctggagtgcagtggtatgatacagctgactgcagcctcgaactcctgggctcaagcratcctcctgcctcggcctcctgagtagccagtaccacaggtgtgtgccaccacgcccagctaagtttttattttttgtattttttttgtttttttgagatagggtcttcctcagtcttcaggtacaatctcagctcactgcaacctcaacctcctgggctcaagtaatcctcctgcctcagcctcccaagtagctaggaccacagacacacaccaccacacccagctaatttttaaaaaattatttttagtagaaatgaggtctcactattttgcccaggctggtctcaaactcctgtgttcaagtggtcctcccgcctcagcctcccaaagtactaggattacaggtgtgagctaccacacccagcctaatattttattttttgtagacacagggtccccttatgttgcccaggctggtctcaaactcctgtgttcaagtggtcctcccgcctcagcctcccaaaaggttgggattacaggtgygacccactgtgtcagcctctcattgttttccatctgacaggtgagaaactgaacctcagagagcatggattactgacccagtatcacagctagtgcagtgcagaagcaggagtggaacctccatttggctccactggccagactccctatctgtgactctgtctccaagaagctcttcgaggccagacagcagcatcttctggggtcttttaggtcacaagtatccctggtcttttcatgactacacatttctggctgactttagagctctagatgtttttctcctatgttgatctaccccgtaaggctccatgagaggcttggactattgtttcacagtaggcttcctaagacattttgcttagctccttgaaggcttccacctgctcttgagcttagraggagaatatggcctagtcaaagagagaagagcataatagcagataggagtaagtgagcaggaaacacagagaaatggtgaagaggaggaaagaatggccaatagaagatggaaaggcagcagtcacggtcacaaaaaaagggtccagaaacaatacaggagatgcacaagagatttcattgcttttaagaagtgttatgctaaaatatcttcctctatagggaaaagacaatggcaaagaacttttaaaatttttatttggctacttctatttaagtattaagtatatcgcggtgtacaataaatgtttacttaacaaaatacataaaactctttcctgggctaaaccttgaaagacagtcatacatatttcataagttttttgttgtaaaatatttgatgatttcgcagttagggggtttcttagaaagtgctatacataatcagatataacctttccattttatatttccttgtgtaagcaccatgacttctagtaatcttgagtgtctccccttttcaattcacttaggaattttgcatttaaactattgcccttgtttagggagaacaaaacaacacatccaaaaaaatgaccaaatgtgtacaacctggtattacatttctgatttacataatttccacctcagaaaagttttcttaaatacaaaactcactcactttattttaatgcccgaaagaatagcccagataaatggactccaaatttgaggcctgagtaataatgcattttaggattagactagtcatccttgctattttcgtggtgttcatcacgtacagagtacaacaagatactctattatcccttcaggctgttggataaatacaaataagcacatacaaccaaaacaaatcattgtatctgtgaattgaaatgcatgtcataagaactttaatctggtgcaattgctcttatagccaagtaaatatagtcagcaaagcttaccttttatgttaagcattttacagattacatatgtaagataaatttaagatttgtgtttaaatgacttttaaaagtaaaaaaagcattgggaagacttcttactcagaggttgtggtcagtcattttcaaataatttttcattgccaacatctcatacataaacttatataagcttctacaacccctcccagagtcagccttctctcttctttcagtaacatcctrtgttgccatctgactgaactgcaccatttgtcaccagttccaacacatcttgtcaacataccttttctattggaagaaaaaaagaaaatgggcttgaataaaaacatgtaaataaatgatgagcactttgctcttttggttgaattaaacagtgttgaaaggtgttagctagagaagacttaatagaaagtataacattttaaataatgtttaaggggaaaaagaaaaagayattttaggtttcagaataaataaaagataaaaataaataataaaagattttaagtattagggatgacttgcaaaatctcagaggtaaaggtaagaaacactagacagaaaataattttatttgaatttaaaaaatgggagagaatccacagaccctttgagggaactggatcatctttgcagactccctgagatgtcgaaaaactgtgagtctgcttgctttctcaatggggatgctcatggtatggggcaatttctcagccctgatcatctgctgcctggaaatagactcagtgctgttggtaggggatggtgggagtgagaccggcctttaggactgcaggctgcatgggagtggggtgaggcctgtgattgctggctttcccccacttctctggtatcctgtatgactcaacagtggcagccataatccccctgggaatacaacttcattagactgggaaccacatccccatcccccacagcagccacagcaagccctgccaaaagagaggctgaactcagacacacctatccctgcctccacctggtggtctttctctatcagccctggtagctgaagacaaagttcataatctcttgggaggtctatggccctgtccactgcctaagaaaccttaatactcaaccagatgtccctagggcaagtttgcaacctgtctataggaccacagctgatgcactcttgaaaatgacacctcctggctggaggctaaaccaaaaccagtgcattaaacaaaaacacaaccaaggacctcacagagtccacttcactcccctgctacctccaccagagtaggtactagtatgcacagctgcaagacctgaagagggatcgcatcataggactctgcagatattccccagtacaagcccagagcccagtagctccactgggtggctagacccagaagagcaaaaacaatccctacaattcatctctcagaaagccccattcctaggagaagggggagaacaccacatcaagggggcacctcatgggacaaaagaatctgaacagcagttcttgaatcccagatcttccctctgacatagtctacctgaatgagatgggaccagaaaaacaattctggtagtatgacaaaataaggttrtttaacaccccccaaaaatcataccagctcaccagcaatggatccaaaccaagatgaaatctgaattgccagaaaaaagaaaaattggaaggttggttattaagctcatcaaggaggcaccagaaaaaggtgaagtccaacttaaagaagttgaaaacgtgatacaggatatgaaaggaaaaatcttcagtgaaataaagagcataaataaaaaacaattgcaacttctggaaatcaaggacacacttagagaaatgcaaaatgcactggaaagtctcagccatagaatcaaacaggcagaagaaagaacttctgagctcgaagacaaggcatttgaattaactcagtccatcaaagacaaagagaaaagaattttaaaaaaatgaacaaaggctccaagaagtttgggactatgttaaatgtcccaacctaagaataactagtgttccygaggaagaagagaaatctaaaagtttggaaagcatatttgagggaataattgaggaagatatccccggccttgctaaagatctagacattcaaatacaagaagctcaaagaacacctgggaaactcatcgcaaaaagatcattggcttggcacacagtcatcaggttatctaaagtcaagatgaaggaaagaatcttaagagctctgaggcaaaagcgtcaggtaacctatraagaaatatctatcaggttaacagatttctaagcagaaaccctacaagttagaagagattggggtcctattcttagcctctttaaacaaaacaattattagccaagaattttgtattcagcaaaactaagcttcgtaaatgaaggaaagatacagtgtctaccaggcacacaaatgatgagagaattcaccattaccaagccagcactacaagaactgctgaaaggagctctaaatcctgaaaccaatactcaaaatacaccaaaatagaacctccttaaagcataaatctcacagtacctatataataataacacaatgaaaaaaaaaaacccaacttattcaggcaacaaatagcatgatgaatagagtagtatctcacatctcaatactaacattgaatgtaaatagcctaaatgcacctcttaaaagatacagaatggcagaatgaataagcattcaccaaccaagttttcttctgtttttcaggagactcatctaacacataaggactcacatcaacttaagataaaggggtaaaaaagatattttatgcaaatgggcatcaaaagcaggaatagctattcttatatcagaataaacaaaatttacagcaacagcagtttaaaaagacaaatatgttcattatataatgttaaagggattagtctggcaggaaaataccgcaattctaaatatataagcacctaacactggagcacccaaatttataaaataatcactactagacctaagaaatgagatagacagcaacacaatagtagtgggggacttcagtactcccctgacagcactaaactggtcatcaagacagaaagtcaacaaactctagcctgcaacaaatgaacttaaaagatatttatagaacattctacccaacaactgcmgagtatacattctactcatcagcacatggaacattgtccaagatagaccatatgataggccacaaaacaagtctgagcaaatttaagaacattgaaattacatcaagtactctctcagactacagtggaataaaattgcaaatcaactcctaaaggcatccccaaaccatacaaatacatgcaaattaaataacttgctcctgaatgatcattgagtcaacaaggaaatcaagatggaaattaaaaaattatttaaactgagtgataatagtgacacagcctatcaaaaccactgagatacagcaaaaaatggtgctaaggggaaagttcatagcattaaatgtttacatcaaaaagtctgaaagagcacaaatagacaatctaaggtcacacttcatggaactagagaaaaaagaacaaaccaaactgaaacccggcagaagaaaagaaataacgaggatcagagcagaactaaatgaaattgaaacaaacaaaaacaatacagaaaataaataaaaagctgtttctttgaaaatgtgaatgaaattgatataccattagtgagattaaccaagaaaagaagagagaacatccaaataatcgtaattagaaatgaaatgggagatactacagccaataccataaaaatacaaaagattattcaaggctactatgaacacctttacacacataaactagaaaacctaggggagatggataaattcctggaaatatacaaccctcctaggttaaaccaggaagatatagaacctctcaacagaccaataacaacctgcaagattgaaatggtaataaaaaaattgccaacaacaaaaaaagtccaggaccagatggattcacagctgaattctatcagacattcaaagaagaattggtaccaatcctactgaaaatcttccaaatgatagagaaagaaggaatactctctaaatcaatctacaaagccagtatcaccctaatgccaaagccagagaaggacataacaaaaaacgaaaactacagtcagtatccctgatgaacatagatgcaaaaatcctcaataaaatcctagtgaattgaatccaacagtatatcaaaaagataatccaccatgatcaagtaggtttcacactagggatgcagggatggtttaacataggcaagtcaataaatgtgatacaccacttaaacagaattacaaccagaaatcacatgattgtctcaatagacacagaaaaaccatttgacaaaatccaatctccctttgtgactaaaaacctcagcaaaatctgcatagaagggtcataccttaaggtaataaaaaccatctatggcaagcccacagccaactttatactgaagaggraaaagtggaaagcattcccactaagaactggaacaaggatgcccactttcaccacttctattcaacatcgtaccaggaatcttagccagagcaatcagacaagacaaagaaattaagagcatccaaaatggtaaagaagacatcaaattgttgctgtttgcagatgatatgatggtatacctagaaaccctaaagtttccaccaaaaagctcctagaactggtaaatgaattcagcaaagtttcaggatacaaaattaatgtaaaaaattagtagctctgctatacactaacagcaaccaagctgagaatcaaatcaagaactcaacccctttcacaatatcagcaaaaaaataaaatacrtaggaatatacctaaacaaggatgtgaaagacctctacaaggaaaactacaaaacactgctgaaagaaatcatagacaacacaaacaaatggaaacacatcccatgctcatggatgggtgaattaatattgtgaaaatgaccatactgccaaaagcaatctacatattcaatgcaattcccttcaaaataccatcatcactcttcacataactagacaaaacaatcctaaaattcatatggaacaaaaaaagagcctgcatagacaaagcaagactaagccaaagaacaaatctgaaggcatcacattatctaacatsaaactatattataaggcaatagtcaccaaaacagcatggtactggtataaaaataggtgcatagaccaatggaacagaatagagaacccagaaataaacccaaatacttacagcccactgatattcaccaaagcaaacaaaaacaaagtggggaaaggacaccctattcaacaaatggtgctgagatcattggcaagccacatgtagaggaatgaaactggatcttcatctcttatcctatgcaaaaatcaactcaagatggatcatatacttaaatctaagatgtgaaaccataaagattttagaagataacatcagaaaaacccttctagacattgacttaggcaaagacttaaatgaccaagaacccaaaagtaaatgcaacaaaaacaaagagaaatagatgggaaytaatgaaactaaaaagtttctgcacagcaaaaaaaataatcagcagagttaacagacaatccacagagtaggagaaaatcttcacaatctatacatctgacaaaggactaatatccagaatctacaaagaattgaagcaaattagcaagataaagacaaacaatctcatcaaaaagtgggctaaagacatgaatagacaattctcaaaagaagacatacaaatggccaaaaagcatatggaaaaatgctcaacatcactaattatcagggaaatacaaatcaaaaccactatgtgataccaccttacttcctcaagaatgaccataataaaaagaaaaaaaaaaaaccaacaaaaaatagttgttggcgtggatgcaatgaaaagggaacacttttacactgttggtgggaatggactagtacaaccattatggaaactaaaagtagatctaccatttgatccagcaatcccactactaggtatctacccagaggaagtcattatacaaaaaagatacttgcacatacacctgtatagcagcacaattcactgttgcaaaaatatggaaccagcccaaatgcccatcaatcaaccagtggataaagaagatatgacaaaaatatttatatgtacacacacgccatggaatactacttagccataaaagcaacaaaataatgacatttgtagcaacctggatggaattggagattattattctaattgaagtaactcaggaatggaaaaccaaacgttgtatgttctcactcatatgtgggagctaagctatgaagatccaaaggcataagaatgatacattggacttcggggacttgcagggaaagtttggggactggcgaaggataagagaatattcactgggtacagtgtacactgctctggtgatggctgcaccaaaatttcagaaatcactactaaaaaacttactcatgtaaccaatcaccccctgttccccaaaaacctattgaaataaataaataaataaataaattgaatgaatgaaccaaaggtattgcacgaggaagcaacataaataaacttagtgagtgaaacagtgaagaaaggggcaatgtgatggtggtgataggtatacaggttaccttgttcacccttttaatactgtggataaacagaatcaagtaatttgttcagctaactagattccatgaaaatatgtagccatttttctggctaaatgtaagaagagggaatgaacaattgggttagaaccttcataaaaagacatccacagggaagctacaaagatttcttatggtccccaacaacaagttcgcatactgtgcctaccttgtttttctcacagtttgatttcaatcctctcacattttgtgaggtggctgtttataccaatctgtggcctaagatattcttatgactattacttgtttatcaaaatggtacacattcttcagttgcagctccacaggctttctggaactactgtaattaacattgatttctttatctctttccttatttgtcatgtatgattakcactacatagaatgacatttactttttctcctttttcttttatatgtgctaattctgtctctttagcctagtcagaagctctgagttcgcagaataaccatgaacacagaattaaaggtctagatagatcttgtctaaccctttcattttcaaagaaggaaagtttgtaaaatggaaactacagtgatattgagtgtatactatgtgtcagacagctttaacatttttgtatgaatcactcgtgttgtcatctcaaaggtcatatggaatacatactattattgtcatcattttacaaatgaaaagaacgatatgcagagaagtggcttgctgagggcacacagctagtaagagacagtgctgggattcaactctagaccttctggctctagctcttaactttccaagttagtgctgcaggtagaacaaaaactctgtctcataacttctttctccatttcagggctcttgcttgttctaactaatttgtaccaccataattcttatactagagcataataaaacaaaagagatgcaagtgtttattaacttcagccttgtatttcacagatcctaaacatgtaaacatacacctgatacactctcatcctttccgaagagagcaagtaataatgttatactgagtgattaatgaactgatgtaaggactcagtaatccgcatgcaattagtggatcaacaaagcaatttacgcagtaggtatgtattttgaatagtattctttctgtagggaaccagctgtatgtagtgtttaattgaatgcttttgcatcacagagtgatttggagtcaaatcatcarccgcatttcccaatgtgtcaagtagacagttaacttatcaaaacttccgtagtactcagttctcttccaatgtgctccttatcttgaattcttttgaaatagtgtgccttataattttccaggaatgatttacatgtattcctgttcagagacagagggatggattacataacattccctgaggccctttttgccttcgagtaaatgctctttatcattctaagcttcttactctgagtaatatttgaacatgaccctgtggattccccataacaatttctgatactgtttccctagttgatatgtttggatattttccatactatgcaggctgaattctctttttaacttagtatgttctttttcactctgatgctttgacttttgccatcatagttttctttattttcagagtttatcgactgtcactaggctttcttctgagtcctttcgccaagtcatccatactttgctcttctaatcttctgttataacaggcttcctgttacttatatttttgctgttatactctgaatttgttccagattttctggtagagatttccctacaccaaaaacagtattccaggtgcagccacttgagaattgagtagagataaatatgtgcgcccctttttactgtgatgtcttgccatctgcagttcggagcctgtaaaagttagatttgggattgaaaataagacttccactaggactgccatttgcagcacaaactcacctggatggtaactgctgtctagccgcagctccctttcgacaggtccttctcagaagacttcttttccaggcttttttcttcctgtgcatatctgtgttttcattcattttcccctggtgaataagctggccctttcccaacctgactctcatcttgttatttgatcccaagatctgtaactcctctcagaccatctgcattatttctctgtccttgctgatgttttgcaacattctccagctgactatcatctgcagatttcattagcacaccatttactatgttctgaagatcattaatraagatgaataaacagaagagaagaccttctgcagacatctgtggaatttctctgggctgcccccacaactcgatcgccattgttttattttacctttttggttttttgcctagtgtttcattcacttccctccataagcaccctgttgtcatatctgagtaactgcactcataatgtgtgattttcttgcacagctttataattgcctaaacaattcatcatttgtctgacagcatttttcctttattaaatcccagttttattgacagttttcattatcttctagattgcagaagctatatgtaacaatgtgtgtgcccattctgatttctcctcaatttattactgttttaaaacctgtactatagatgataggaagagagtacgatgagaagagatagactcagaatctctatggctcttcttggaaaaacaccataatgtgtatggaagatcatgcatggggattttcctgcaaggcgctaacagtgaactttctatccaaaaagatagaaagaagttgtctctggttttgaacaatgaagatttatatctaacttatattgaaaaatcaaaggattagattttttaaactgaataagaaccatagctgtacttagagaatatctgtgatgcacttggcactgtgataagatgtgatgtatatcactatgattacaccaaccctgaatggcacttattttcaggtgtgacactagcctatggcggctgtcatgagrattagaaaatggtgtcccctccaggaggatactgcctgtgcctgagaatagagcacaggctgcatctaaggacccactgaccttctaggccagatatctttgtgtgtggcagagcctgcctaaatgtacatggaagccacgatttctttgtcatttaaatgaagaggataagatacctataaaagatagatttgagattgatactaatgtggttcctccatgccatattgtttctctgcacatagaacaaatatggatctaactcatacttctgtgattgcctactaaattcaaacagtactttgtgtttttacttagaaaagaatggatatggccgggcgcggtggctcacgcctgtaatcccagccctttgggaggccgaggcgggtggatcatgaggtcaggagatcgagaccatcctggctaacaaggtgaaaccccgtctctactaaaaatacaaaaaattagccgggcgcggtggcaggcgcctgtagtcccagctactcgggaggctgaggcaggagaatggcgtgaacctgggaagcggagcttgcagtgagctgagattgcgccactgcagtccgcagtccggcctgggcgacagagtgagactccgtctcaaaaaaaaaaaaaaaaaaaaaaaaagaatggatataatttaatatgtaaccttctcttccaatctttagctatgctgttgattttcttcccagtcttcagctatgttgtttttgttattgtcattattattattattatttattactgaatctagaaagaatcatggagaagaagcagtattactctgggccaggtattctttgtaatatctttaaaatacatttgaacgctgttcacatatccctttgtttgcctattagatccggtcaacattatgcaaacacacaccttcatgatattgaatattgatcaatttagtcacatgccatgcaaacgtagaaataccacttaatggctgggcatggtggctcatgcctgtaatcccagcattttaggaggccaaggcaggtggatcgtctgagctcaagagttcaagaccacccagggcaacatggtgaaaccccgtctctagtaaaaatacaaaaaaattaactgggtgtggtggtgcattcctgtagtcccagctacttgggatgctgaggcaggagaatcacttgagcccaagaggcaaagttgcagtgagccaagatcatgccactgcgctccagcttgggctacagagtgagactccatctcaaaaaaaaaaaaaaaaaaaaaaaaaaaaaactactacttatcaaggaatgttttgaatgctttaattctttgacttaaattactatatwtatttataaaggtgtagaagatttracaactggaatgtgtgtgtgcgcatgcacatatacacacatatgcacatatgtatatatgtgtatgtataacatatatatctataaataaaagttatttaccaaagcatcatatattttcattttcttttctttccttttgttagcattttcatttttcttgagtactgtttttattgaaatgcaccttgcactttagctatagagcttttccttgttgaacaatgtagttttcttgctcaacaactctgacatccaggtaaatggaaggaaaatggataggggagttgtgtgttcataatgccactttgccaccctgaaatctatgcagataatctacttggaaggctttgagccccagtggaatacagaaccatgtaagtatcctgcattgatttacagcacctgctacagctgcttggatcttggcaggcattttctctcctgccaaatgctgttgaaattgctgggctggtctagatggaggttatatttactggacatgtttataatcttcagagtgatctaagccatagagagctaatttcccaaagatcaatgactaagggaggatttcagaggttatcctctttatccaatttcctgtgtcctaatgagatggctgaaacctgtttggaatctttctgattaggaactcttgtgagagtcaataaagaatatgacattcataaatctaaataagaggcgacttggcagcctgtatggtgattcatgccacgagaagcctttcccctgcccccaacaggatgtgccatgggtggccaacctgagacaaggtcagacttgaaccaagagtcttgagaggacttggcctctcctggttaattcagaggactcttctggctattagaatgcgctgtgtatattttttacctgtcttgatttaattcaattcaattgccattcaattcaaacgaaatgtatttgttaaatgattattatgttttccaattaagaaggatgacacaaaaaaactatattggtatatggtaaggatcattatatagatctaaaaaagttttatcaaagatgatgataatcataatagctaatgtattttgagtagttactatgtcaggcagtgtgctaagcacttcacacatgttatttaatcctaacaaattcatgaattaggtcttattatacctattttgcagatgaagaaactgtgacttagatgcattaattaactttccatgttaacaaaatccttcccaaatcccatattcccctctcgctgtcttttgccccctctcagctaatcttctaggaaaaacttgtctgcctttatcatctctacttctttacctcccatttgtttctcaacccattgagttaggcttctgccactgccatcaaaatgaaaattaaacagggtcatcaattcctccacatgtccaatacagtatttttgtttcactggattgctcaccaccttttcccacaattaaccacttccttctggaaacagtatcttctcttggtttcttgtaccacatattcctgtgtttcctctggaatcatgagctgcttatctccatttgatagcacctcttcctctgcctaatttctcattactggagcattttagtttcggttctgggtcatcttctcttgcccctggattctgccctgtgtaggggattttaaacattgttggtaccacgtacattattggcagtctcatgaagcctatagactcggagtgcataaaataccctggatatctctcagtatcccaaacgtagttcttacaaatgggaactcttgttttccatctgcaaatttgtttttcctccagtcttgtccatcatcaatccagttgctcaagaaaactagaagtcatctatgattcctcatttatcctaaaacacaaagcttataccatccattagcatgtcttggctattttatcttcccaccgttccagattttcccactttttccttctatccactgccaccctgctgtgaccccttaggtggtgcttaatacatgtttagtgtatgaagaaaggtttggaatggggaaaataaagagacacactgaatcactaggggacatgtaatactctaggcaagacccaagatagaacagggacagtctgaactgaagacaagaaggatgaatttaaaagataagtgtgtccagtggaaaatacagacaaagaattaagagttacaaatgcctgttagtgtaatcgggttgtttgaagctatcttttaaaaatttccatttctttttaagtagccttttacctcatgttctgtgaagtcttttggagacagtaaatcatattgtttgggaaatttaagggtggagatgggaataaaactgaaaagaggaatctttcctagattaagttgacaaagaaacagctttcttcagccatttctctccagacactagtcaaacaaacaggtgagcaccagatagtttgagcagcagctggaacagttcaataagagtctccctctagcctctccttacttctgaataagcaaagttaagctacagtcaactagtcggcttctctaatattctgtattgttctgaggtttaaggctttgtttttttcttggctgtctaggctctctgattaactgagattaatctctatcatcctgtgtaagctaaaccctaaatyacataatatgttttctatctgtatgccatatgccttccatgtcagggatgactccagagacaacaaaagcaagctgtgtttttactgattttgcaaacttgcattcatcagccttgggcattttggcctccccagtgtcagtatggtgttttaatagctgagaaaaacaacagaaatataaagagaggacactgtgaaaatcactttccaaactgacttgtattgaaactgcctcacatctaagtaatggaaaataacagtgattaggataatgcggtgcattacattcggtgacagttaatcctcttattaacttcatggtcatatttcgctcatttgttaggttggaaggactgtgtgagaatrttgtagttcctgtttttctgttcattgggaaagttgggaaaatagttctaaaaataaaagagttccaggttgaaaagcctttgaggttgactgttctctctggagatgcatgtttaccttgtgccctttatccatgctttgagtttgggtacccactctttgaggcctcattctcttccctttagaggattttctttccacctgagcaatcaccagtgagggaaaagtcagtggggtggttcagctgcrtgatatgttgcattgacaaatggaggcagagccctgctccagccccgtgagttggaacaacctacaaagcatttctggcagtgagccaaagaggtgatccctcctctagggaaaaaaaaagtcaatggctgagattgcagttctccatccccttgctgggctgattcatacagcagcattgacactgaggtctcagaagaactgttctcttcccagtccatctaaaaatatctaaattcagatttataatgtcaggagctgataaatttgctgaggaaatgcaagcagtgtcactgccrtgctaggaaatctattctgatgaattgatgagggaaagaaattccaaacatagcagagtctcagagtgccacttcccctgggatggtgagcaaaatgagcatgttttccttgccatcgaagttcccttcttcaaacatagtagaaagtagaatatactagattgaaaaggaatatggaaaatacctttttgatcaaaagcatgacatgacataaaactaaatcttatggcctgtaaaatattcttggtttacgtcaagcaaggggttcccttttaaaatgctctttcactaagacaaaaattccactcacatagccctggtgacttttgattgaatcaggatcttttaaatttggaactcagcaagaaaccgactgtcttactttcctacaggttttgtttgaactttcagaatctaagttgatattgcggtctgctgctaaccagctcttycctctctttagttggtcagtggattctcaggagtattataggatgtttcctccataccacctggcttgaaatgatttggcataggcttcaactctaatttattcagcatccctttagcgcctactagaaaccaagtatcatgactggaacttttctgaaatgatgaaggtgccatggggacagatgggcgtgtaaagaacttattacaaatcaaatcataacataataattgatactgaacaattgctatgagaattgaacagaggaaatgcttctgctgggaaaagaccaagaaggcatcagagaagaagtaaaatttgtggttggggtgatacaatgaatgagtactagcaatttctcaggggagcagagtatgtctaacaggcagaacagcatggcactaagttaggaaaagtaccacctgccttagggacttcaacaagatatttgaagtgtttaaataatttttttttctcacttggattttggcttttgccaaacaactaacaaacaactgttacatttgatctaattattttagatcattaactttgaaaattgctgtttgtgtgatttcctaccttggccttgggcctattatgagctgacatctaatgaacaggtggctggtacattcctggagttttgcccttgtcaaacacttgacccagaccgcaaaatgtcatggtagctttccctgctgaaaccttgtggacttacagctcagtaacgatgttctaatgatctaacatgctatgccatcatttgttgattcataaagtcatgagataaacactaacattattatcactgtctccttgaatgaaaattaaaggctagacttttaattttatgcagtattttcttgactcaattatttgcattaaaaaatgtttaggcatttcattctcatggacctacctcttaatatgctttcttcttaatcaggcaataatttgtaggtttgggcctcaatttcaatagcaagtgagccccaaactcagtaaaaagcaaaaagggttttttttttctgagattcaatatgaaacacagcatacaaatatttcatgtaattttaaaaggtaatttagcatagatatgcatactgaagtatttaggggaagtagaaagatgtctgcaatttattttgaaatgcgtcaacaaatatgacggatggatagagggatagataaatgggtggatatgtttgaaagcaaatataataaaaatgttaccatctgagtataaaatacagctattgattataaaattattttaactttgtggaatgtttgaaatttttacaatatgtttggggagaatgataaggtagcaaagaattaaactggtagaggtgcttggataagaatgatgagatacttaaagtgaagagaaatttctctgacttatcaaaatgtagacacgaatgtagttgtgtctgtgagtcaaagtacacaatctctcttctccattagcttatgaatctgtcagatgagaaaaaagatcatcctaggagaaagagtagttcactgtaaaggccagaactttagtctacttggcaatatataaatagacttttggggtttatttttaatataaaacactgatatttttcgcaaataaggccatttctgccttctcagtcatttcaacatatattgagcacttcctatattcctggcatggtgctaagcacgggggctttaacttcaaaaagttgaacatcaagaatggagaaagagaacaagaaggtgatgtcacacacggaaagaaggacttaaaatgtgctgtgagagctctgaagagggagaagtccctggcttgttagctctgatttggggcaggctactaaacctttttgtgccttagtattttcctctataaaatctggccaataataaatgttaaactactgtctgttaaatagctggaccttcataaatggtcactaatatctttaacccagagaggaagatcaaattaggaaaaaaaaataacacagccataaaatttgtttgacagacatccttctttttcccatccctcctctataccccatcttttgttgccctagtagaatgataaaatcacagccctggagctggaacagacctagccctagattttggacagatattccattccaacccccatttagaggtgaagacactgaaataacttgagaaaagtgacttgtctcaggtcccatagctagtcaatggcaaagtgggtgaacatgtaggataataaagcttttactggagagagaggttgaagaaaagttctttggaaatatagtttatgatttcttaggatgtaagagagaaaatgctcagaaactttttttattgttagaagagaatgtgttttagtgtacctaaacacattgcattagtaggttctcaagaggcatttgttgacttgtattgcattaaacctctcctgctaattgtctgtatagcatggttaacccttgttatgtgggtaactgttcctttaattaaattagtttttaagtcttttagttatattttggtgcctataattgacagaatctatatctcttaaccccacatagatttatgcagttaggggtagtgaagattgcttctctctttgtgaaaatggaatgagtactcttgtaacatctctatatttgtatcttatttgatctgtgggacatagaacattttcttgacaagatagcgatttcccctagagatctgtcaattcacaactttgaattaaggtctctaggcgttctaattatcagagccaatgacccccgctggctttgacctccaatactttagctggacagttcactcagagcaaagatagaggttctttatactaaaggagaatatttcttatcacagaggagggaaagaaggagaataagagaaatagagggagtggaggggatgagagaagggaaagagaaagagagtaagtgagatgtcactgcaaaatgtttttaaattatttagttgatactattaggttggtgtaaaaatagttgtgcttttttccattaaatagtaatggcattattaaaattggcattattaaaagtaatggcaaaatggcaattacttttgcaccaacctaatattaaattttttaaaaataaaagtcatataagagactaagcaaatccacaataaaataaataagttgaaaattagtgaatgaaataggatctccacaaacaatgctgcagaatagtttagaaacactgaaagatatttctaacatgcaatacagatcctttcatgcttcatttgagaagctggtataaatagaaaagtgaatgtacagtctcagaatctcagaccagaaaacattctagagcacaagttctaagacaaaagaaagagaggactcacactctacttgggaatgggctgatttttgctccattgagcagattgcactgttgattaacaaggtagatctggtaagaagttgagacagagacaccacatgctgaagaatctaggctgtcggtgctttttggaatctcagaaagaggtcagggagcccttgtgactccaggaggtaaatgactttcccattgtttgctgttccttcccagcctcaaaaagtagggatgcagacagctgcttctgagggtgattttttttaaatttaaaagttccacctgggcatgatgcagttgctcatggctgtaatcccagcactttgggaggctgaagcacatggatccttgagcccaggagttcgagaccatcctgggcaacatagtgagaccctgtccctacttcaaaaaaaagaaaaaatcagcctggcatggtagtgtctgcctgtagtcccagctaccagggaggctgaggtgtaaggacaactttaatctgggagatcaaggctgcagtgagccatgatcatagcactccactccatcccaggttacagagtgagaacctgtctcaaaaaaaaaaaaaacaaaaaaacaaaaaaacaaaaaacaaaccttggaaaagtctatagcttcatcttatgcattattcccccatatactgataaaattcaagtcccttcatagaacccaaacagctgataatgtggcccataattgtgaattccccaagcccagcatttgaaaagacaatttaaaaaatgagagagaaagagagtcagtgctgataagtatgaggtaatgtgaatgtgtaggcacagggtgactttgtaagtgggaagaaaaggagggagaagctaactttcattaagagtcttctaggttgggtgcggtaaatcacagcactttgggaggccgaggtgggcagatcacaaggtcaggagatcgagaccatcccggctaacatggtgaaaccccatctctactaaaaaaatacaaaaaaaatagccaggcattgtggcgggtgcccccctgtagtcccagctactcgagaagctgaggcaggggaatggtgtgaacccaggaggcggagcttgcagtgagccgagatcgcgccactgcactccagtctgggcgataaagcgagactccgtctcaaaaaaaaaaagtattctgtgagccaagcgctgtacttgattacttgatttaatcctcgcaattatttttcatataacatgatgagaagatgggggtccttgtaagcagcagaactgggatttgaacccaaatctctatgacataggtccccatacattttctatgacattggttgtgtgccatctggctcatgactttccagcaatttcagggataaaagatgtataataatctgacattcaaaacccatatacttttgcctgtgttagctgctctgggtaaaactattggataaatgaggtttggagaatagatgtgaattttcattattcattcccttctgagaattgtccaaataatattatttctaccagggtgaaatagagggggaaaaaaaacccctaggtttctggaaatattgactatgggatataaggcaaatttagatgttaaaagtgatagttgccaaatttgtcaaatgccgtaatgttctcatgtacaaaaaaagttggggaatttttgtcagaaaattatgagttttgcactggccaattcaaatcaaagagtttttttttttttttcttgtctttggcaggttttacaagggggtgtccctgaggggaggtgaaatgagacctagaagcaatttttactgtaacacacacatacccatgcactaacttgctttcatatagttacctgtacatgccacatttcatgattaaaatgcagtccagaaaaatatggtgcactgggctatgtatgagtcccattctctttctttctatttttaagtggattttatgttgcctatttagtctgtaatgaccataagccactccagccaacttgttttaaagctcagagagaagtaggtcactaaacaatagaataataatgtggccacatatttaactttctagtacccacatttccaaaaagtaatttcatccaaaactatcatttcaacatgtcattaatgtaaaacactgttaatgagatattttgaattttttagtggtaggtcttcaaaatctggtgtaaatttgcactgacagcccatcacaattcagtcaagcccacatttcaagtgctcagtaaacacatttgtctagtggctcctgtattggatggcacaggtgtagactaggaaagcattcactcatggtgtttattcaatattttctctatcttctatcatttcttatattaagttgtagagagagagcgcactatttctaccccatcagagaacatgaagggatgcagagaagaatatgttgagttgactacctacctcacagaggacctctgcatgacatttagttgaagggaactgccttctctttttccaggaagattaaatctttatcctctctgccattcagtttaatacctatgtgcaaggcatcagtagagaccagatagatagatagatagatagatagatagatagatagatagatagatagacagacagatagataggcagagatgtttgtgtgtgtgtttgtgtgtgtgttgtgtgtttgtatctctaagtacatgaagaattggcatacatcccagaacacaacagactgaaactcctgattaaagataacaggtaaatggaatggacatccaataaaaacctgtttgtgtttttaaacaaaattaaaagactaaaataagaatagaatataggaataggaagaaagccctacatgacaataatcaatttgggtaccattttgttacctcctggccttctgcaacttaaagggaaaaaaaaattaccaccatcaggcaaatgccttatcatgataggacaaaattcttcccattgtatggctctgttggcatttttaaatgtgtcatatgtggctgggttgtggggtacaagatgtagacttgcttaggagacaaagaccagcataaacttttgaggatccatcctacatggagaatgtagtgaatatgctattgctctaagtggagacagagtcttgcatggcaggaagcttcctaaggtgaccacttgagtcatgaggcttagaagtctttgcagaagagggaaatgagccttcacattaggaaaatatgctttactattacataagttctgggatcaactgatacaaaagttgggagaaatcaaaattttaagtttttcctatgtgtgtacctatgatacaatcaagtttttattcaatttataactcctgaattcattcatcaggagtcctttaggaagctaaacagaactggcaggtctgtcatttggatttgtcatgattgtgagtatttcgttccctgcaattaaaaacgtctgtgggacaacaggatttcaagtcaggagattgttgggtccttgcttctgctacttagctaatctgtgactttggaaatcactctctgaatgtcattttgtttacatctattaaatgtaagctctctctgatagcattatgatgaggaaaaaatgaaagcatgtgtctgaagtatctggtacagaggccagcacatactggttgctcaataaataccagtttctttcccttttactactctaacaatttctcgtttgtattttctgctcctgagctctgtgtcttgaaaagttctgttggcatacacattggacttgattgcttacattaaaattatctattcttgtctctattttgtattaatgaatacaattaatctgattacaagtataaaactatcagtcaggtttctaaaaagttattaaaacatatatgtattacctgcttcccacattccagtgccaggctctgtagaaacaataatgaataatacagctattgccctaaagaggcttcaccaatcctgtctgtggttcagcatcaccaggcaataccaatttgtcatcatcatgctgaatggggagaggtttagaataatcacaggagaacgtaagaccagctcctggccccgtcttgatgggtcatgaaagaacaccgggtactatcctgagttgaaataattctagctcatagttaatctataaagccttatccagagaaattggagattatctttaagcattttgaaatattaagcatagcctgctggccccaaatgacattttttttaatatttacaaattattaataaaactaaaaatttccatcccttccctggaaccccaagcaaccaccgattatttattatttatttatttatttatttatttatttatttatttatttattcattatagagatggagtctcactatgctgcccaggccggtcttgaagtcctggccccaagtgatccctccgcctcagcctcccaaaatgctgaggccacaggcacggatgcagagtttgcagatgggcagctaccattttcgagtatgcagtaactgagttttgtgagaagagcaaagtggaaagggagaatgacttaattaggtctgtcctttagaaacaggtctgcaaaggcagtgttgcaaactaatccaagtgaaaaatcatgggagacttaaatgaaagcattcctgggaatgaagaaggcagatttagtaggattactaatgacaggttggatggaagatacaaaagagaagaaatctatattgctgtgatccattaagtctcattgtctacttttaacacttaatggggtggcagtgttgttattctaggctatcctttatgaggttggggttcttccctgacagttgctgaggctgtgggaacaaacgagttcatatagggagtgagtgaggaggaagacttcagacgctcagggattctacaccatggaggaggctacgaaggagatccattttcttctaaatcattctgataggcttctggatggctttcggtctctggccagctgctgatggaaagctctcctctctgatgaagattaatcatcaaacccaggagataattttattctgctcttctgagtcatgttagattccagaacaattaactttattttccccaaatcttgtatctcttgggaatcttccagtaactttggtttccagtctacggagctacttttggcagcttgttgtcaaagaagtgataattcttaaagcttagagtgctaaactgcaactcagttgagaattgaaaccttttcagtaaggggctcagccccagacacctgggactcctctttctcctttcaccctcaggtacaggagtgttacataaaatggcactaatccacttttacagtttttgtgttattaagcaatacattaagatttaataaccataacaaaagggttgttttctcaccaagcagttattatttgttgtacttctatttctactcatttaccttaggtttgctttagcgatttcaatttagtaggtgtctaatgatatgcctgtcaatgaaactttagagatgactttcagtccttggaatttttttttcatagtttcaagaagcaagacttgcgaagatgatttgcgttaagaggtttgtgtgagttgagtgtggacttaaattaaaagtaacttaatttactcagagtagtagaatctagtgcatttaaattggttgagaggtgcagacttcgctttggaagtcactgtaaatcgatgccgatagagtaaaaagcattctctgttctcttgctgttcctttttgaagggttcagaaggttggaagagcatccaaatcagtataatcagacctattagatcctagcaaagaattttaaatacatacatctttttgcatattgattctggcaatttaaccctcagcttaaaagcagaaagttggttcaagtgaatacaacatctcactctgcacaatattaagaaatagatctactgaaactaataaaagaattccattgttgtctcctccatttaaaaaaattctacctgaaatacttgttagaatttttataaaagtagtatctcatttatgtacaaaatagtttgtgtaaactataagtagacaaagatgtagggttgtatcacttctttgataagatactgatcttgtatttttamccaatgctaggcttaataaaagggtcctgtaaaatttactatgaaatctgtatgcctccctccaacttcttttccaactgagattggagtatggcaaaggaaatgaagcatgaagggaaaactaggagctatgataatctaagattcataaacaattataacattatttgctcacttttgattgtgcaaatgactaaatcttttaatgaagcataatgacccatctgacacatatataacaacacataataaaagataaaattaaatttgtcaaagcaatatagaccacccactactagtagattatgtttgggtttggattttcatatattttatccatatctgtttccttctattgggactttatggaggcattactcatgaactttggcagatcttttttggtgtgtctgaaagaaaatcccaaagctggttactaagatgtttgaaagtcatattcttcttcaaaccgtgtagaaataactatcaggaaataagtggttataattttaaaatggcatgtttagggaagagaatatataagtttgaaaaaccgcagtctcctccaatacatttctacctattactaacagggtcaaaattgtctacagaaaacaacctgatctcaatttcctcagacaattcagctagtaaaatggtgtgactgacctagagttacggagataactcctactgctgagctctctcaacaagtgacaccctggttgacaaacaatcacacattatttattaaacttctatttaataacaggagttatggagttagcaatgttaagtgaagagtccttgttttcaaactttgcaaattacagttagtaactaataaactaattaatgtcctttatgaagagatgctcagtgatggcctgaaaaatccctaaaggagatagggagagaattgaagtatggaataaaatgacctatatgggaccttcaaacttggagttttctatattttcaaaaattacttttgctgtcatttaatgtccaaatccaatcccttgtctagggaaccagttcagattaaacaaaatttcaaaaatacacaagcaatcaatatctaattcatttaagtcctgtttcttcccaggactgctgggtataagcctagagttgcctgccatttctcttatattcaaacactttgggaaaggagccatttttttagatctattttctccctgaagcttgggagctatatctatataaaatgagatgacatactagggctagcgtactaaaaccttttctaagagaatcaatatagctttgagaagcctcatttatatttaaaggagaaaagagacataagtagaagtggacataacgtatcatgtagacattgaaaaataccagaaatgatttaaaagtgactgcgtgttctcatattcccagtgccttgtaatttgacttggagggatgttctagatctccattgaatgtgctcactgagatttgtctttgtcgtattgattacaatcatctgtcaatgccctcaatattttctgtactgaccaacagcgacacagatcataggctgtaactagtacaggctgtgccaatgaaacaatagggctaattagcagacatgaaaatgaatcactgatttaattttcctcctggtctaatcaacacaatgtgtcagctaaatattttgatccattatttcaagtgaatagaatgtgcttttatattatcatttcaatttcattaccttgaatattggaatttttgatttttggatacatcagtgtccagtcagtatccagtgatttttagatacattttggatacatcagccttagcatacatcagtgcctacgggtataaggcactgatatgttaataaacatattaacagtttgtaagccaatgaaacctataattattgcataatttaaattaacttgtgtacaaaatgccataatatttccacatacgtggtggctttcaaaatcaaaataaggtgagcctatttcaatttatgacagacaattgtatatctcctctcttttctttgccaaagaagccctttatttcatcctcacaggtgttatacttgtctcctttctgcttggtgaaacaatcacggtttgtaatttcactttctgaccatcaaatacgataaaatgaaacagtttgtgcttttcttgtactttccgctatcaggggttactggttgagagagctcagcagtaggagttatctccgtaactctaggtcagtcatgccattttaataggtgaattgtctgaggaaattgagatcaggctgttttctgtaggcaagtttgatcctgttggtaacaggtagaaaatgtattggaggagactgaggtttttcaaacctacatattctcttccctaaacatgccactggctggctgggatgctaccttataaatgtgaggtagatgacaccagtctgtaactctagacttctgtcatggatagcaggataacttagactgagagctgtctgtcttcccagcccacatggccacaggatcagagcaggtcatggtgaagcagaggagaaacagctgcaaagcagagaagaaagtccaatagggtaggatgtgatgaataatgttgtgaaacagacagctagtgccagtaaggctcctatatcatagaagtctaggaagatacaagcaagtgctgtcatagacagataaatgaagtggacaytgttttgagacaaaagcaagctggcaatatcagagaagcttactataaagagcaaaatgctgggtgcactggctcatgcctgtaattccagcagtttgggaggccaaggcaggaagattacttgagctcaggagttctagaccagcctggtgagacctttatctctacaaaaataaaattaaaaactacctgggcatgatggtgcaggcctgtagtcccagctacttgggaggctgaggcaggaggatcgattgagcctgggaggtctaggctgcagtgagccatgacagcaccactgagccttggtgacagagcaagaccctgtatcaaaaacaataacaaaacacagcaaggaccctattactctcaatgggaaaaatcgcagttgcttttgggccagcctaataataacttgacagagagaattttattccctgcaagctacgagttcgttttctttaacagatgaggtaactgagccacataaaaattaagttacttgtctagagacacccagctgataagtaagagagcagacatttctactcaagcaatctgactccaaagctcatggtgatgaagcaggtcatgaaagctctctttatgacacatttgaataaagcagcatgacagtgggacaaaaagtacacaagacaaaagctccatcgttagggccaaagcataggaacaaactcaggccagtgatggagcaacttcagctgagattttagccaagagcttgttaacatctttccagttcccagatagaattagtcctaaggaattacgaacattgtattccatggyatatatatatatactacattttctttatcctctaatcaactggtgatggacactgaggttggtttcatatacaagagcagatgtcttttatttttttttttttgagacagagtctcactctgtcacccaggctgaagtgcagtggtgtgatctcagctcacggcaatgtctgcctcctaggttcaagcgattctcctgcctcagcttcctgaatagctgggattacaggtgcacaccaccatacccaggtaatttttgtattttcagtagagatggagtttcaccatgttggccaggctggtcttgaattcccaacctcatgtgatccacccgccttggcctctcaaagtgctgggattacaggtgtgagccactgcacccagccagatgtcttttttaatatgatgatttattttcttttggataaatacccagtagtggtattgctaggtcaatggtagctctatttttagttccttgagatatcttcatactgttttctatacgggttgaaccaatccatattcccaacagtgtataaatgttctcttttctccacatcaacatctgttgttttttgactttttaataatagctattctgactggtataagaggtatctcatgtggctttaaattgcatttccatgaaaaagaatgaaatcaygtcctttgcagcaacatggatggagctgggaaccattatcctatgtgaaataattaagaagcagaaaatcaaatatctcatgtattcatttataagtgggagctaaacaatgagcacatatgcacataaagatggaaataatagatactggagacaacaaaaatggggagrgagagaaagctgaggattgaaagatgatctattggataaaatcttaattatttgagtgtatacggagagcccaatcttcaccattacacaatacacccatgtaacaaacatgcacatgtactccctgaaactaaaaaaaaaagaaacaagcattgtgaactgctggatccccaagaaaggcagatgaccataactaggaagaaaaggagaaaaaatgtgcaatgtcaagaaacatttttgtaacttatggtcaatcttgtgtttctgcaactcacctacatcttaccatgtagaaatttagggatacaaaccacaaagattctgagggcctaatcatctctcctagacttgcttttgcattctggagtaataatctggaaaagcaataagagtagggacatatttatgattattcttaaaactgtgtgtagaaaaatacaagaatatctactccaaaaacctgcatgaagacatttgatagttagccaaaattcaagagactcctaatctttgaaagctacacattaggctggtgtatatgtcccattatttgaaattgcacctttatatatttgagacatttatcctattatccctaattacaatttccccactacaattcactgcacagtgcttccttagggagctgcttaatacatttcaatcttagaaggtcaagattccctcagccaattccaaactgcattgtcccattgaatagatgtggcacattctggatctagtgagaataacctatgtatattactttgaagtaatacaggtaggccattatagcagaaagaagttgagtaaatgttgatatttaagaaggttcataaaatatttgaacacaactgcaatccatacccaattctcagtggttttttttatagaccatgaaatcatagctaaagtcaacttcggttctgccctaacggagagccacaaataaccctaaaccatagataactcaaatgcatttttacttggcttttgactgctttttatgataattttcacagcacattgctcttctaattatgttttgtttgggatcatattaaaattaacttgtatttagtgattatgtgctacctgatgagttaaagaggagccctgggagtgtattgaaaaaccaggctgtggatggccttcagtactttacacaaagaaaagccaaatagttaaaaaggcattaaaaatggaaaggatgtaactagtgggcaaatagctccaggacctcagttgcatgaacttagtatatctctttcctcctccttctcccctccctcctccacgccctctttctcctagtctctatttccccttttccttatcctcttcctccatcttttttattctttcttggaggcatggaaagcaactcaaaagaaaaggagacctctatagtacatccgcactcagccttggatagtgagaagtactcaggtctgagtagcctcagacagtggagtcagaagcaagatgaactgtcagggattataataggaatggtcagggctgaaagcaaggcaataggtcaaaacctggcaacaaggaaagagccctggataagtagtttccataaatccaagcaagacaatttgttaaggcttagcatgcaatcaggcatccaaaattccatgaaaaccagaaggcagggtgaggaaggaacaggaaccaggcagcagttctgtgcagtggcaccaagtgacagcaagaaggcagcagtactaccaaggcaagattacacccagccaaaaaaccaccagtctgcagggcagccaattgayactccaggcagagccattcagagctgaagagaaagcactaaaaaaaagtgcagccacttctgtgattaaagacaatgcccatggtactaaagtaccgtcttggagacactggtcatagttgttaaagcttccagccctcccagagaacatctctatgaaaaaaatactggtacagcagccccaggcccaccttctggaggttcagcttttaattttagttgtttcaagtgctgtggaaaagactagacctgatccctcagttcttcatattgccttatgaacactggccagaagggaagcacatccctcccttttgttaatttcctccaatattgctaagacaaggaatttcaaaatgttcaacaaatattaagaaacaaaaaagaaatgaataaagaaaataagatgggcaaaaataagtatgcatgcaaaaataagtatgcatgaaacataagttttcaaatatcatacactgacattgattaatcatcactagctgtcaggagagagtgctgtattgagaaggatttagcaacccagaatgtcctaactggcttggctcatgtctgctgtgggtaaaggaaaagcagggagtgctgacaagtctgctttgtatttgccaccctttgcaaataggtactcaccctattcccaaagagctaatataaattacatatcactttatttgtgtttgatttattacataattattattagaataattcacataattataaccagaagccccaaaagagcagagaccctgactgatttgttccatggatacctccagcatctagaacaggacatgacatatagtaccccttcaaccagtagttgcctgacttttctgccctcatttaatggatcctgtctctgaacctgcaggcatcatcatatactatcgtaagtgatttccttagcttcctaaacccagraagaatccacattctatttctcatggtttttttctatctgtatagcagcatcaaagtgggccctggtttttagtttgagggatatgccacttctgcaaccagctggcataaatgtggcaattgacacgataagagaagctgttctcccagccagggaagaggcattaccaattacaggcctatactataactgtgcctttaacatcacttgcatgtaagaatgcaggtctctatgttagaagagtgatatctgctcacagcatctcatctcctcctcagctctcccagcatttgagcgctctctccgcttcgttttcaaccatggtagtctaatcactggcaaaccaccagtgagttgattgcagccctttataattcctgtgtagtgagatgccataatgacttttccaggagtttccacatcatctgtttactccatgtgacattccttccatctgtctactttcagtttattttactttattttttagtaacttcatatcgcagatgaaagtactgtgaagtttcttctcaaaaccataatatttttgttacgttgcatgataacctcaggaaacatgaaattctaagaatttaatactaatatcattttgggatcattttttaaagcagtaaaagactttatgttcatgttgtctcacttttcagaggaattcatagctttttattgatgtaagccatttcataaccctgtcaaggtgctttgaggaagaagttaactgattgaacatcaacaaatcctggaatgtttgatactaatgatctcagaaggggccctgcctgatctacattccacctgagcactccttaccaaatattgctcttgccttcctctgcagtgattggttctgatcactgtagagaaagcatggaagctcattttacaaggctgcatgtgtgtctggctgctacctagatgcatgtccttcttgcacaggtcaatccattctctggtttttctctcctttgctctactcccttacacagaaacctaatttacctgtttctttcttaagctcttcatttcagaaaaactcaataaggaaaattaaaaaacccctcctttaggatgtctctcttatttctgccagctttttgaagtatgtgtgctctgggcaggggtggggacaggaagtgtatgtgacaaagatcagtcagacaaaacactcctggcatgatttccattttagagttgtgaaactgaagaatgggcaggtaaactgatattttctataagttgtgagaccatgattcactgatttgtttaccttaatgaagcatacgtaaaataattgataaattattttatcaataatttggtaatttcctcttggggctaattgaatatagtgagtataattgagtatacggtgggtggctttcaagcgtatctttccaactttcactattttagtaccctggctagaaaatgataatctgatagtgaaaatattaattcatcctctacaaggttctgaagatactaacttctcagtaaattcagatatagattacaaccattttcaggatataataaagaaggactaaaggtatctctttggtatgtggttctttacggccacataaatggcttccaagtcttcatttccttaagttcatttcctgctaccctatggacattgctaccctctccttctctgggttacaaataaatggttgatggcattttaataacaaagattaaccaggttgccatgttaaggatagatgggagaagcagtttgggaaggtagcctagacaaggtgatggtcttttcaggaagttctcaggtgtctacaataggtagcagaattgggcctgagcaaaagtcacatgagcttacagcaccctgtgcagtcaaactctcaacttcacttaagctttttctttgctttgcttctgcccactcacctggcctgttaccacccactgttttaagcagctcttcagctgcacatctactgtcctgctctgccctgaaataggatgataggtaggactgctgtacccacagtttacatgtccttaccctccatgtaaactgtgggtacagcatttgctacctaccgtgcttctcaaataccggaagcatggtttggacagctgaaggcttagcaatcattccaagctgcagcatctccttgggcctcaggctaacacccatatcaaaacaacttgcgcggtggcgggcgcctgtagtcccagctactcgggaggctgaggcaggagaatggcgtgaacccgggaggcggagcttgcagtgagccgagatggcaccactgcactccagcctgggcaacagagtgagactccgtcccaaaagaaaaaaaaaaattatgatatttaaagagcatatttaaccattaaaatagtaaatatgttgcttattttttttcttaattgaactgtagtgtccttattgttttaagacttcatcgtatattctggatacaattcctttatcatatatgtgatctgtatgcattttttccaagtctggcttttcattgtctcaactgtgtctttcaaagagcaaaaattcttaattttgatgaagtctgacttatcagttttctttttagtcaattttgcttttgctgtagtagctaggaaatctttgcctaacacagtcataaatattttcattttttacattttgtgtttaggtctcccgtgcattttaagttaatatttttacatggtgcaaggtgtatggattaaggtttgagaacagacagacaggaatgtctttcagatttataaaacgtaaatgctatatagttaagcatttaataatcttttctgaaaaggaaaaaaaaatgcctacatttgaaaccattctggaaaatgtaagataatgtggttttcctaaccaacagtagtcagcttttaaatgcagtactttgactttattatcttatcattgagattcaccatgtttttatgtaccactaagaaagaaaaagaaaaaaactgattaaattgtttaaaaaaaaacaaaaaccttgaagacaattttagttacctccaggctaatcatttcctttttcttttctttcatcgcccctgaaactcccccaagcattatccaaggtgtgggctctttttggttagtaaacttcacttgtcatctcctttgagtgtgcttccccactctcgtcatcttctgctggcttaactcgaagcccaaatttcttacttgtagatggttaacaaatattccacattctctgcattttcttcctgcatttggaacctgggtttcctttaaggacaccaactccttgaagtcacactccccctttctcgcacgcatacacacatgctcagacaatgagggtggctatctggcagcttccacctttcccactagagttttcaaatatttgccacactatgccagtgccaaaatttatataataatctatccttcagaggcttctccccttgagctgctcacaatttacccctccttctaactcacaaggagttacaaggccctggaawtgtgcctccctcgacagccacaagtgaaatagtcaccaggttcatggtcttactcgaatccctgtcatgcagggatttcttcatttgcttggaatgactcatcaaacagcctagctttacagttccttgacctcggctcttcccaggacttttatctccatatgtcgacaggaatctactttcttggcacttgttactaactggaactgtatctattatcctttctcaacaagaacctctcatatctcagcatccttctaaggctcgcttactatttcacctcttctgtacttctaactttgagccttttattcccttcctatttgcaagcttcctaggcttcatttttaggaccccaatgttgatcacttgaatttccctttcaccagctcactgactctcttggcctttcaactcatcctttttacaaacccctggagcaggtctctcatcgcccttcaccactcctgcagccagtcagaacagctggtcaaatgaatacaggaatggactcactcattcataccaacggtgttcacttgacctgccataacagtgtgattctacaggccctgcaagttcatgctgactgtatatctcactcttctgcctcagagctagagaaaacaacactgaaaatgaccaaacctcctaatcaggaactggtaaattaaactgtttaaaaaagttctctttatatgtgtacatacataatatataacttcacagaagtgagcaaaagtgattacactgtatgtataaatttatggggagaaatgtagcatctgaattcttttcctttttggtttagtttccagttcccctcttcccattctccacaccaacatcatccctcacctcataaacctacacctagaaaaactatgtcaataatctagaatgtatctgggattttttcccaagttcatatgcttaaaaatatatacacactcatacatataccatcatatacttataaacacacaagcatactgtggatatacaggcttttgggctttgttttaaaagatgagatcataatatacacatcttctgtttcttgcttttgtcattagatatcttgtagatatcactctagatgaaaaggttctaactatttttagatctaattattaacttgttcctttgtataaactcgtaaatatttattgagcacctaccatatgccacactgaagcctgggatttattcaaatttcagaattgagaagggagtagagagattcatagtccagctctcttacagaatagatggaaaatcaaggctccgtaaatattcgtgatttattcaaagtcatgcagccagttgatgccatgtctcaaatcaaaatctagctcttgctagcccccaagtccagtcctcttttaatcatactattcagagtcccataaattagcatacaattacttacaatttaatgtgaaaacatactacaacataagataaatcttcaggcctggagtagggagaggatagggaggggcaaggattcaggaaatttcctgataatggtttgttgtctgtgtggatagaccaaattgtctttaatgaaccaaatttatcaaccagtgaagactcattaagatgcccagcatttaaagggagatcaataaaagagagaacttagtattgaaaagctatgaaagagctttgaatgaaattcactctccgtcttagcagagcgcttttcaagagtgagaatcatgggtgggctgtgagggaagatattccctggccatctaagcacatctggaaaggtccagatttcaaactgtcgctcttttgtcagtgctgaaaaacttaaccttgagcgctaggaagatgttctccaagatgctgaaacttgtcacgttatatgagtcttcatgttcataggcaaaacaaaacaaaacaacaggcatatacatgacattaccttcttttttgtttgagacagggactcgctgtgtcacccaggctggtgtgccatgatcctatcatggttcatttctgcctccaactcctgggctcaagtggtcctcccacctcagcctcccaagtagctggaactacaggtgcactaccctgcctggctaatttttttctttaaattttctgtagagatagtatttacctatgttgcccaagctgatctcagactcctggcctcaagtgatcctcctcccacctggtatgaagcactgtgcctggccttgaatttcttaatgatgtttttgtgaatctatttgtcaagagtacaactgccagatttttgtgcatttgtgcccctctgctccgaagtacccygactgtcagtctattcattcagtcatcaaataactttggggcatctattctatgccaggcactactatggtaggccttcaataaagggaggctatgtttacatgggccttccacttcacaggcaagaaccgcactactgaatctcccgtgtctttgtccctccagataatttagtgtgcaccttatgaccttcactgacaaaatagcgaagaatgaacaaatgttccttaaagccagctaattctttggttattttaaagctgattggatcttttgtacacattctaaagactctaaagagagtccttgaaggcataatttcactgaaagacatgcaccacaaaccccctgaggcatccaactgcagggaacacctcagctcagtcagtatgtgatgagctttcatgtcgcagggcacctgacagttggatgaaaaattgctttcagtctgtgctgggttttctgtggcagttcagaagcaggactaggttctgggtctttactgtgtatgtcatcttttctttcagggttctgtgtttccatgcaaataattataatagtgtagaattatttgatacctactaagtgtcagatttcctgccatgtacttcacagacttttattctgtacaacaacattatgagtcatgtaatatcatccccacttcagaaagaaggttcggagaggtggggtaagttacacaatgacagaactacaagaggcagagcaggggtgaagctcagatccccgtgtctccaaacccaaggctgaaaccgctggctgcactaccccacacagttctgaggcagaagagaatcaggaggtgaggatgggaactggggaaggggttatgttctgatgagttagtttttaaaggagagccagattttctgaagcagaattttaaacatgaataggacatgttaacttgatgttagtgaaatatttcctagagttggggtttattgttgaatactaaactcatgggagtactgcataccactgtggaaaggtgaacagaatgactttagggaatgtgacagtttacaaagaaaaaagtaaagaaaggaaggaaaactagaattctcagtcctgaccaaaactatctctaggataattatggtttatctaaaacttgtttctctgggtaatcagataaccctgctctctgtgagtgtagacttctccacatgctgtatgaggatacctctgtgtccctgtagttaacaattttaattataggtgaagtattcaggttaagtggcctaaattgacactttacatggagaaaaaagtctctcatgagactatatgctataaatacataattattcatatttaaactcaacattctattgcttttatatttgttttatattcatttttcacaaagtttcctttgcaattgattcctgggtgatggtattaacatgtcagtattatttattcaagacaagtggaaaatctcaagaaaaggctaaaagacccttgggagcttacctagtgactacaacagaactaggaattaaatggctgtaaagtgacatgttgtatacaacacaacataatttattatgtgttgcattaatatagacgttttgaggatatcaacattagctgaggaatcctgatgtctgccaattaccattgtttggtaaaagattgggagttctggatttaactgcttggtaatgaaatcaacggtttgcttcaagttaatgttatacagtagatgcctagctgatttcttgtttcccctactatctaccttaaacgcattctgggtctcccttcatctttgtaggtttctgagctatttttgtactgtctacatatcttgattagctaatctgtatattaaccatacgttctgacaagagttcagtgacatggaccctcagcccatgacgctcactaccactgacatgttgcatgtgagtggtggggggagatgaaattagtttattataatatgacttttgagaagatatagcaaaataatcctctaatccattctacagaaaaccttttgtttttccaactttattacctttcattattccatctcagctgttttcactttgtgagattgctagggtcaatgggtgaggatctgccatgggtgtgtgtgtgtgtgtatgtgtgtgtgtacttttcactgtcaattattctaagaaaagcaaatgctaaagtgaagtgaaacagacaatggttcacagtaaatatcaagctgtgtttgtattgctgccatctctttgggagaatttcttatctgttcctacagaaaaattactggaaatatatatcaatgaaaacgtataaatgaaatcctgaaactatataagattcatatctcttgattatccaaaatagagacatattattacttatgaagatgaaatgtttgtggtttgatgctaaaacatttagtactaataattattccatatacagtgttcgcattaatctcgactacactaattcagagcatgagctctttgcctttgtgcatgaagacagtttcttgggcaaattaccaatgtaatttcctcgttgtcattccgcaaaccatctatgttcaaatattttaaaagcagctgtacagaaccaaataatttatattttaattctatataaatcaacatatacttctttacttggacattaccattttaacttcaaattcaacatgtctattttgaaacccttgatttccaggataaatcagtctcttgctgacttcccttctcttttgtttgtggtagaatgattcccctaatgttggagccttaaagtctaacttagtgactcctctcatgttttccatatctagtctggggcaacatccagaaattcttcctgttctgtttttcaactatctttttagttttatttctagtgccgccatctcagacctctactaattcattggaattatttttcatctctctgtctaccatttttttcttcttccaattcatcctatgcatcaatgtcactctattttttcatatctgcaaaccactcagtggacatccaatatacaagcaaaccaattataggtgaaatttaaaaatatttattgtaatttataaaagaatagtaaactaaaaatgaatggtaataacagcaattataataatggaaaacaactatgatgctaattaggaggaggaagaatgttttcaaagtctttcaccaggtatcgatattcatctcaaagagtttgaacaacagattcaattctgtgtagggaccatttcttcatttattctttattcctactaaatcagaaataccaaattcataagtcatttggaagggtaacaaatgtttgatggtttgtcaactagtcttgacaaacggattctacaatgtacagaaattatggagacagttttcactgatagatgttcagtgcctcaaaggaaactcattaagatgagggaatgccctctcaaatgtaacaggattgttgaatayatcaacacaaaagatcactagcaaatggattcctaatgaattcctggttgaatttgcctctgataattatgtattcatattcagtttgagcattcagatgtgttaaatatggccaataatagcactgatttatttcctcctttaatttagaatatctttaagtagttagaaggaaacccttgttaactaatccattgacatcaaaatttaactttttaaggaacttttgctgtctctcactaaatattagaaatgatgatatgttgttcatgaagtcataaagtcaggcttctccactctctgtttgatttttatgtgtatgtgctgctcataaaaatcatcacactggtagagattcttgttctcacaatgcagattcacagtgtattttctccctgaaaacttgttattttctttggaaactttatgccaaatgatatataatttgcagtactattttcatgtctttctacttttacatctccgatggattaatgttgcagcattaattcattttgtgtgagttggtactctaaaatacaataaggcagacagctttaaacccatgtgatgtttaatatcctacaaagaccaaagagtcatagtggatatttccctcaatctaaaaataagggaaaatactaataagcaaattatgtaaaaatgaatctgcttaaatagacagcaccctgtttgccagatgttacctgagacaaccaatccatatatcccatgtatgtgagatgtttaaaaatgtaagaattactaaggacatgataaatttttatgagaatcataattaatcatatagttcaaatttcatggtgcctgtctattgccaacccctagtttttcacaggtttcacattggaaagcaatgggttgtcctttggcttattttattttagtaattaactgtcctttaaaaacaataaaactttcagccttcagtgactttgataacctatgtgataaagtcagaactcattagcctgatattcaaggtcttcccagagaggctccatcttacctgctctgacttctgtcttatacctgctgatccacctggggtgtctgctgaaagcaggtcagcacaatgactcagattcttccctttctttccctctcccatgccccaggatttgtttgtacaactggcccaggaatcctgacttcatttattctctatgggttaacccaggttcttgcttgtgaatggaaacaggataatggagctaaacctaaatggcattttctaaccatgtcttcattattcattctctgaaccatcctctctaatcagtttttactgatttcttccccaaatatgcatttgctttctcatttcaacttatatttacactgttctattcatcagaaatgtccctgtcttgtctgcctcatcaaattcttcaactcccaactcctgtcttacttcctatataaaatcttattaggttaccttagctgaactatcttcttctttctggaattcctattgcaattacttttgttgtaattatttaggcagtggtttctttgatatcatttactgtgttttctggcaattgcactgaaattgtatactgctcttcaattaatgattatctatttccccaaactagattttaagcaccttgaggacaaatattgcctcatatgcctgtatttctgttccaggtctttggcatactgttaataatgaacaaatattatattacagtaaaactgtatcccaagattttctcagactcatctaaaatataggcaagaacttaataacactaatatgcctgttcaatgaagcattctattcaaaatgttttattaattctttacagcttcctcagcatctgattggaatcagtggcattttaatttatatgtctatttaacaaatactaatatagtgtgcactgtgtgttactcattttctatgcactttacaaataataattttatttaactttcaagacaaccatctgaaataggtgctattattatccctgttttatgtatgaggaaatggatttactgagaagtaactcagccaaggtgatggaattagttactaataggttcaggatttgaacctacatttttaaccactgtgctctaggaacttagttaacagctttaatgaatgaaatggttctgctaattgatgtaagaaactacttacatgttttgttggctaggtcacctgtcactctcagttcagaatctttcaggaaatgtcctttagtctctggtgggaggtgtactgcaactaaccgtcctttgaatttatgttgccatgtacagtccctgtaattttatttcctctttctatctttacttttgggatctaagcttccttgaatgtttagcctttttgtctttttagaaaatattgttccctttatgaatatgtctcttaattgctagagtttcctaatagccaaatgaaaattacattttggcttagaaaatgctttcatctgtatccactggctatatatctgcaaccaaagtaaagtgtggaattgggtatttgttgtttgcagcatttgagcagtgtacacatcaaatgtggttaattctattaccagtaatatttctagtttcttctaaaattaccataaaggtttaggtctagattagataattatttccaatcaatctcctttcaagttggaaatgaatgaagtcccatgttttctgtgtgctatttcatatattttggcatgataattattaatagcaatgtattactattgctcttttgcttacttaaaagtatattttgcagtggtttattttattctaggtgggagaataacacgttgatatcttcttgaaataaaaattatatgtcaatgaatgtgacaatgttctatgtaagtagcaatcgaggaatgactgaaaagggattattaaatatttcaatgcatgggaaaatatttcttctacctatttactgcctaaagtaaatgctaacccagaagatatttatgtcttggtttagaaatctgtagagtgacagagcaatctgagctctgtaatgtatgcaaaatttatcaggctcagagagacatgagtatgggactttggccacataccatacctgtgcccagggacaactgttaggaaacattttgttccagactagttgtgtcacctattatcttcatgttcctggaatttgtgatacaaagaacaatgtatagccaatcgatagcttatgtatttgaatgtatattcttggtaaacaacttaggaactgcctcttgtttttttcctaaaaaaagccacttgtaatggctggtagttggagtgtataatcagagcaacttgaatctacgctcctgagtggccatcttcaacaatcaccctggaataaactctttttaaactagaaaacaaaaacaaaggaaacaacaaaaaagaagaaatctatagagtgaactatatttttccaccttgcaaatagaaggggcaaaaatcaaccttgcctatctgatgatttagtgtcatagggattccaaaatgttatttgtaacgtgtaccttgatatgctaatggtgaaatctcctgtttcttgatttggtcttctcatcttacatttcttacctcaaatccattctgcgacttcaccagcagattaatattctttcctggtctcttggaattttaataaaaacagcatggtcatggggtttcatgaagcttgcagccctctgggggatgcagataataatcaatcaatctcataattaaatgtaattttaaataagagcttacaaaaaaaaaggaatatggtgataatagagcctagacaaagggatattacccagttagtagatgtgtatatgctgggcaaagggattgatatttaaataatgtacaggagtcatctaatcaaaatggtagaggtggtgggtgaggaaggatcttttgtgaaaatggaacaacatgtataaatatataccatgatgggcaggagcacagagattttgagaaaataaagctgtggtcgcagtcacagctcaaggagacagtgggagaagggaattcggtgaactggtaaaggtggcaggatcatttggtacctcataggctctgattaagattcttcctatatctttagagctgttgaaactcactggagtcttcaacaactgagtgacaggattagatttgaaaagatcattcttgctatggtgtagagaatagtcattcttagatcattcttgctaaatcttccatgagaaagtgagtaacatagatttgaaaagatcattcttgctataatgtatgaaacagttgggaagaaggtaagttatgggaagaccatttgaaggctatcacaaagagaaattctgatcatttagattaggtgatggagagaaaggatgaggaacccagaagatagtgggaattaccaaggcagagatgtggataatacagtccatgactatagaacaggaagtgctgaaagagcatgtttctgcacatttagaattaagagggatttggagcatctggagcagaatttgtttgttgggaatgatgactcgggagaggcaggtaggggccaaattatgaaggtccatttttgtgatgtgatggcaaaaggaacaactgaataaattgagcagggaatcacagtcagatgtggagtccagagaagtctctgatggtgtggaggatgctccacatctctcatgaaattaattgagaaactgctatttttttcatctaagagttttaattatctttcatttagttcccagaggctattgggcataggcacctagtaagtaactgttaataacaacatgcttattttgggcatggcaatgtggaaatttattcctgccgagtaatcagtgccagttttatgctggcagggttttaaaagaatggagaagggattcttttgcctccattaggagaaagctgtgccttctcttcatcatatagtgactcattcaaggttggcacaaagtaactttaatcaattaatgtgaataatatcatacctttttaagcctaaaatggatattagaggctatcagccccctggaaaaaagtctgcagaatatttttctttcaatgataatgtcatatatatcatagcccttgaatctttccaaaacatttagtcaatactgaaaacatccctagagagacactcatccaatttctcacatgtgaatcttttatctatctttggaaaattttaagaagtgcttaatttcagactgcttttataaaggacataactagtagcatggtaaaagtgcagtccatgaaattaaattcctgatctgaacctcaggtcaattaacttctaaaaatactctttttgagacaggatctcactctgttgcccagactagagtgcagtggtgtgtgattatggctcactgcagcctcaacctcccaggttcaagtgatcctcctacctcagcctccagagtaactgagactacaggagtatgccaccaaacctatctatttttttaaatttttttgcagaaatgggatcttgctatgtttcccaggctagtctcaaactccagggctcatgtgatgtgctctgctgggtgctatactgggctgacaatggtgaataacatctaattcttctccaaagagagcgctcttcaactgatgagggaaataaacaggagagcaggcagtgaatgatagagcagtatcagaggtgctaggttgaggatcttcacaagcttctaagtcaggacatcctaattcaaaccaggaaggatcaaagaagacagtaaagataatgaccacaagttgagtcttgctataagctgaatctggaagatagaagtgaaattgtccatgaaaaaggaagaaagaagaatgtcgaagaccaaaggggaaagagagtaagacaaggtaaatcaccttttgatatcgttgctgagttgtgtgaaaggctgtcaaagtgggcagaagtcatgttcagaagagttttacattcaaattaaggagtctctgttagacagctttaaatccatgtgtctaatatcttacaaagaccaaagactcatagtggatatttccctctatctaaaaataataaacttttctttccaaagggaaaaatttttacttatgaaaaatgtggtaaaatatagaataggaaattctgaaagatacaagttcttcttgaacaatgagcaatgtaaaaatgataaaattattgcatgatacaatcttttttaaaaaagagaaaacactgagcatcttttccttaagccccctttcataaaatctcatattwtgcccacttctccatcttaatgattgtggatttctttctcaagacctacttaatacatctcagttggaatttcgaaatgctggcaagtctttaaaaatagacagatgatgaccctaagacatttggaacttatcctaaaggctgaggcacagtagagaaaatatattgaataatatacaattttggtcaggaaatgaggaactgctaggttagaggccccattttctgtgtctggacactggagagaatgcttgtgtttggtcctccaattaagagctgcatgatgcctgtgccctgcaatgccaacacttattgggaacccataacctttgcttctccaacttctccagccaagattatgatgaaaaaagaggcaaaccacaattgccaagtctgttctcagcaattcgttcactggtctttcatcattaggcacattgcccctgtgtacctttggtcccaacgcataaagggatcttgcattgtaagcacatcatatgtttatttaaagaattttgaatctttgcagctcttattgactgttcagcagtgaaattagctgttgaaaagcatttgcactgggggtcgtttctggaaagaaaagaagtatttcttaccttcttctctaagactgcacattccttgggggtttacccatttgagactgcaagaagatgaaataactcacttttctctattaaaaggtgatctcaattgctatagagagaagaaataaacaattattaatattcctgtgtcagagagtgtttataaaagcaaactgtgaggttcgtaatctktttttagacaagaaaaagatttaaagaatgacttaaagtgatgattataagaaaataaggagaaaaaggagagagaggagaggttaataggtaggggaaattgattctagaccaagcacttaagaattctagttctatgtttgatttcctttttatacatcttgcactttgctctaaagcaaaggagttacaaaatttttaggcaaaattttctacccatgattagcgagcatttatagaaagaagcaataagttctttcagttgaatacacccagtacctctaaaaattaatgtaaagagcacatttcatggtcactaaaagaagggtgcaatttaatgtatgatgttaccatttattactaagaggacctgatacacaaaaatataaattactttttccatatcttctttcagcttcaaatgattttgattttttttttactttagatactcagagtagaatttataaagacatttggggagtatttctacctcaaaggaaaacaaaaatataatgacatttaaccatttcagatatttcatgatatgtagttagttttgtgtatgtttctactacattaaaatatccaatttattggttgtcttgaaaggcttttgttttctgcagagattggatttccaaatatattaaaataattgcagtatttatattgtccgttcttaggggctgtacttatattgcatttctttgcagagttattgatgatgtatccttgttctgcagtatggcacttggcaaaacattgcttcctagtttgaactctccaatgtaaccttcagggggaaatggttctagaataccattgcatcaactcttttagcaaattgcattattagacatccatttataacttatcctctaagtgatctcagtcgaatcatttgctgtcttggtttcacttctatgaaatattctagagcaaatgctgcccttgcttgtgtcataggactgcagtgttggatgccttctgtgaagttcatttagcccctcataatatgcattccatgtaactaggagggaattttctttgggtagatttctcagataagttgtagggggtggtgtgactggctaaagtacatcagtaagagatcattggcttgtgaggagtgcaaaaggcaggcagacaaggggaagaggaagtggaagaagccctacacatattgagcaccagtccacaccacactccccatgaagcacttttcatacattgcctcatgtagactttgagatgactctgaaatctgggtgttattagaggccagagatctcaaaaaacttgctctagacacttcatacaaccggtaaagggtagaattggcatttgacacaaatttgactgcctcctaaacttaatacattttctgcaaagttattggagacaatggagcatgaaatatttcttagtttcaggggttgaagtatcatctgcacttagttttcttctcaaataagataaactctaaacaacaataagaaaagtagatttgtgagttttgtacgaattggccagctattaatatcatttggcattctaaaggaagaacggctgaagtaaaccacaggtgcagatcaaatcttgatgtctgtttcactgcaggagacaaatagaatctctctttcttgtatgcttctgttatgttgagtctaaatctgaggtaatcatgatcatttcaacctgaggtatggtttactaaattaggagaaacatacaaaagtttgttgacttttaaactaaagaaggcaaaagccataagtgaaacaattcaagtagagtgctataatgtgactgtttctaatgacaacttgaattgattgtaaaataagtctggcagttaaaatgtattagtgttggctgagcatggtggctcacgcctataatcctagcaccttgggaggctgaggcgggcagatcatgaggtcaagagattgagaccatcctggccagcatggtgaaaccccgcctttactacagatacaaaaattagctgggcatggtggaggctgtgcttgtagtcccagctacttgggaggctgaggcagaagaattgcttgaatccaggaggcagaggttgtagtgaggtgagatcacgccactgcactccagtctggtgacagagtgagactgtctcaaaaaaaaaaaaaaaaacatatatgtgtgtgtgtgtgtgtgtgtgtgtgtgtgtgtgtgtgtgtgtgaaattatgacagaatttacctgtaaggtgttagtcatggaatactatgcagccataaaaaagaatgaaatcatgtcctttgtagcaacatggacgcagctggaggccattaccctcagtaaattgaggcagaaaaagaaaaccagataccacatgttctcacttacaagtgagagctgaactgagtatgcatgtacacaaagaagagagcaatagacactgaggcctacctgaggatggaggttgggaggaggatgagaatcaaaaaagctacctatccggtactatgctctctacctgcctgatgaaataatttgtataaccaaaccccagcaacatgcaatttacccatgtaacaaacctgcacatgtgcccctgaacctaaaagttggaaggaaaaaaaagggatagatgttagattattccaacctcagcattttaaataacctctatgactttcttagataagtaatagtaataccaaaataattagagagtggtagagttccatcaccaggtctttaccctcattttaggaataggttaaggcatcaagagataacgtaattaataaaggattatgctgtgatctgaaacacaagtacagtatttgtatttctgagctaagactaaagtccagatttctttcatttcggtgcttgttcgtttataccacactgccccaaaggacactaactgtaatagtactttgtcctgacatttaggacgcactcacacccttttgtccagatgtttctgtcttagatttccttactaaacactaggattgtgaaacctttcctttcctttctagggacaaaatggtattcactggcatatctagtttaatgctttgcgtacagggtgtgccacagacaattgggttaatggttgtaactggttaattgattgacacttaattttcagagttcgaccataactaaagagagatgagctccttgaggagcttcccactcccctagtcctcttctgctgaaaactactgggtcctcaatttttcctgaatacaccgctcatgtggccacccctaactgacccagttgaccatggatccaatttcagccactttgtggattggccaaaactctaaaaggaagcttaccatcaaaatttctgtccaaaaaggaatgatgaacaattatctaggccaactgaattcttctttactctggtactgaaaacatataaaagaaaggaggaaatctgagaccacaaggtgggaagggttataagaatttacagaagtcacaatgatgagaaagcagaagatatgaggtggagaaggtaatacatacatagcaaagaagttgatatcgactagatatggcagctgcagtgaggccagagatccactgaattgctgcatatcacaaaagtggagaaataataaacacatgattctgagggaataagttagcctgtatacttgaggtgccttagatcctatgcttttccagttctgcttcccaagttcatgtaccattccagcaaattccggaattcttttcatactattcattctacaataacttgacccctctttttgttgacgatgactttctgttgcttacaataaaaagaccccagtagctgggcacagtggctcatgcctgtaatcccagcactttaggaggctgaggtgggcaggtcgcctgrtgtcgggagtttcagaccagcctatccaacatggtaaaaccctgtctctactaaaaatacaaaaattagctggacatggtggtgtgcgcctgtagtcccagactcaggaggctgaggcaggagaatcagttgaacccaggaggcagaggttgcagtgaagccgagattactgttgattactgttacactccaacctgggtgagagagagactctgtctcaaaaaaaaaaaaaaaaaaaaaaaaaaaaagamcaaaacaaaaaaaagcctaaattatacaacaggatccatgggagaacatcttgatagctttttagcaggaacatcacattccaaatgcttgctagctattttctgagtatcagttatatttaccatgatcctgaggagcagaccctttattgtgtcccagttcagtttgcatcgtcttcatacagcataaggcaacagtgatagaaataatctctagagtaatctccaagtacctttccaaagctgctatgcctcaagtacttcctttaacctttaagcgtctgccttgcatacagtcctcttgggccactcttggcaaaatatttggaaggagatctggaacctgattatttctcaatgaaaaaataatttgcttttgcactgggaagcgacagtaatccaatataagcatgccattgaaaaccttcatgccctactatttcttttaggacttttgtgaaccctttctctttgatacattacctttggcaatcatggtattccaggacgtgccaatgaagttggctgaatctgaatggtcttggaagagtggtttgtggttggaatttctcttgcttgttgatatatgtactttccatgttggactttgtgcttatgtgaattctccacgtctcaaaggcattatgtctagcaagcaatttctcataaattcttatccatacagttattctatgagagcattgcaaatatagtcagattaggctttgatttgtttttcattctaaygctatctaacaaggggatgttctgatttgtgtagccctgtgcctccaagaagttaacggtaccagatacacagctcatttattttcattgtgcccatgtggttttctgaagtcacactttgtgttgttttacatatgggaaaatggaaacctggctaacttgtctttagtaagtgattggtggagaaattagtagaaactacatctccaaattcctgatctaggtaatgctgtttcaacaagctaagttgcatttgaattttgaaatacccactctagattgcaattaccaaatagttgttatgtacccaatcacaggatatgcttttgaaatttttttcattagtacatggaagagagagttttatattgtggtaggtagaaatgcccagacaagacaggactgagataaattaatggccagtccatttattttgataaacacaaataggactaatgcaccttgagctttaggaactagcagggcatttctagttgcagcatagtcacactaaggtgcaaagagtcaatggacaagcaaaaatgtgtaagaagaaaataagattctttgtttgttttctttatttgacatatttaaaagaaggcaaaagtgtatcttctaaaaagtacattttgtggtagacacttttcctctgctaaaccatatgacatcaagtggcatcccttttcttcctttgtggccattctaaccctgatcccagattggacaaggttgaaatatcagcatgaagtgaagttggttctggttaaacttttccaggattgtcccatcttccagtccttgtaaatgagtgtcatgctttgttgccaagtcaatgaggagacaatgttcacatggagacccttgggcacagatgaaactggaattccttctcacccatttcatacagatagtatgaaactcatttcaactgagaagtgaaaattctggttaaggaagaattggtacttgaaagttgttactttaaaaaattatcttgattcatggttttacaagtcagttataaatgttaatagcctccatcactgtcatgttagctgttgtttcagaaaagaaatacatattgtagtagttttaatagaaggagtaggacagtaaatgtaaatgtctgtcctaatggattgttttatacattagagaacaattttttaagtgatcgagtaaacaaagtccccctcctacctccatggtgattgtttctcatagatgaaaacagttttctcatcctgacgacgacaacaacttcttcttcttcttcttcctcctcttcttcttctttttttctctttctttcctctttatttttcttctttctttcctcctcctcctcctcttcttcttctgcttcttcttctgctgcttcttcttcttctccttcttcatcatcattatctcatcatcattatcatttcagtgaccagttagtgagcaccttcatgtccaagcactgtctggggtcttcacagatgttatcctaatcttcacaccagtttaatacaagtgtgttaatatatttgatatgagtgctaggatatagtatttggagatgagggaagctaagctcaaggtcacattctgctggaactggatttgacaccagagctgtctgattccaacacccacactcttccctctgccatatcctgtgggtgtgtatcaagttttctcccttgcctgtggataggttgcctattttttaaattaagctcactctttatttctttccttctccctcctccttccccaatttcccttttctccttctctttctttcatttttttcccaagatgatatttacctgcaatacactattgaaaatttctctatgcttctgccctgatctaatacaatttttatcaagggaaaaataacatttactaactaatacctttccctgtagaacctgatagaaaataaagcataaaatttaaagtttatgacacactgcaattcatccaagggcgtctaaatgttcaaagaggcacaagagagagataatttgcttttaaaagaaaatgaggccaggctcagtggctcatacctgtaatccaagcactttgagaggctgaggtgagaggattgcttgaggccaggagttcaagaccagcctgagcaacatagtgagatcccatctcttaaaaaaaaataaaaaattagccagctgtctatttaaaacaagaaagaaagaaacagaaaatgggaggaattcaacttttgattagattgtattggatttctgaaaggaaaagggggtaccaaaaaacagagaatttgttgattaagtagtgtttaagagcagaaatgtctgatgttcagtttaaagatgcctgcactgctgtgatgtaacctctgcttgcctgatactgaactctaaccatgtgtatcacatcctagacaggggagggaatggaggataattgacaagaacagcttttgatgttaaaactaggagccaaatgcaggcagggaatactgtgggaagagagcaactagagttgaaaggatggaattttccataagcaatacaaagatttttgatacctgactcctacttaaaattaattcgactagaaagactcatctttttctgaaaaactttctaatcatatatcacttattttagttccacatttgaaagcactgttgccacaaaatcacctattcttttactgattttattaattaataaaagacattgtgtaggacagtatatttgtcataattatgggcagatataagcattagctccattgcaaaataggattaaaactgaatgtacagtgttgtcaagtatgaaatatttttcccagaataaatgagtagagaagcatttaaagtctccaaaaactccaaggggcctaagtgggctctcttccaaaaaaataataataacaagttatgatcatattaccctgaaatagattcaattacccaaacaattagtcagctaacaaatatttatcaaggctcactcttctaactgatctgggatacagaaggattgtaagaattagtatcctccctaatggagttttcattctagtatgagagacaaaagtaacacttaaaagctaaaattgaatgagttagttacaaagtctgtggggttgactcgagtagagggtggttgatcagtgtaggtttaatgaaattaaaatgagtaagattctataaatgcaagactggccagagaaagtggggagctctggggccagaacagcagaggaccaaaggcatcctacacagccaattaaggaattttcctactgmagcatggggtccagggagcttcatttgtaatcccttgttctgctttgtttcattcttggactctaatatggtttgactgtgtcctcacttgaatctcaccttgagttataacaatccccacgtgtcaaggttggtgccaggtggagatgattgaatcatgggggcagtttcccccatactgttctcctggtaagtaaataagtctcattagatttgatggttttataaaaggcagttcccctgcacaagctctcttccccaccactgtgtaagacatcccttttctcttccttcatcttccattttgaatgtgaggcctccccagccaatgtggaactgtgagtccattaagtctctttcctttataaattgcccagtctcaggtgtgtctttatcagcagcatgagaatggactaatacagactccatcacagacctttgggctaaggactttacctctaggcacctgccctattacttctattaaatggtgtaaacacagtttgctcacccatgcaattgccttactgtgattcatcttgaagtctagcctgatgacagggatactatgcaccccacaaccaaccctactgagtaattggctccattaaaacaagagagaattgtgagataatctggatagagttagagttcacaccaaacatagagtttccaatttaatggattagtttcatttttgcaacattcagtactgataggatgggtcaattttggcagggcctagttgccatcttaaagcgaggtacggggtgctatttagagcactttgcagcaacaaagaggacaaggtttgaggataattctaatagctcttatacaaagatattgaaccaagtaaatttataatatgtgggtctgcaaagtattcatgtttcttgagaggagtgcttcagattgagagacgggagcaatctgtaaagaaggaacccaatggatggacactggggaatgaatatcaaggacacagttaggtatgaatttaagctagatgttcacttaggtaactgtagcctggagtggaatgacaggttagaagaagtctcctaggctgggtgcagtggttcatacctgcaattccagcactttgggaagccgaggtgggaggatcacttcaggacaggagttcaagaccagcctgggtaacataataagatcctgtctctacataaaatttaaaaagttagttgggcatggtggcatgtgcctatagtaccagctactcaggaggctgaggcaggaggatctcttgagccaaagaggtcaaggctgtagtgaactatgattgtgccattgtactccagcctgggtgacagagcaatactctgtctcaaaaaaaaaaaaaaaaaaaaaaaaaggacttcaaatagcttacctatgaagaagctgcttggtaataccttaaatttcccttctatgcttttacacagaaccctaaccttgcagttgaggacttgagtcatctcacaattcttttgggtaaaaaaaatgtaaactactgtgacccaactttctttacagctgggaaggcctctatttgattgaaaatataaattaagatactaggttttaagttaaaatattaaattacctctagcttttaaaaatcataaagatctttctttaactaacagtagagggatctagtgtttcaagtattgaattggtttaactgagcaatttctgaatgtcaaagcaacagattctctaataacatcttttgtttttctaaagtttattcccatattatgttatattatcagagagccatgtaaggggactatcttactttatatccccatagaatttccttcccagagttacaatttaacattttgtcctcagcttttttatagaggtcaatataagaaatagcacaggaagaatctcttctcccctctgccctttactctgggcagaattaatcctttacttgtctatgtatatactgtgatttatatatactgctatggtagcacttaggtaataatattattgtaaggaattttgctgtctgagataaatcttccctatattctcccctttgttttactccaaaggactataatcctgcagagtttttcactaatgaatttaggcattatttttctctaaaagaaagatcacactgaaaattatataaaataggctgttttcctgggatacccttgtggcttgttagaacacccggagtcagctggactggactgccactcttcttcacttactttataggcagatgctattccttttagagactgtctctgaaagtgaggaccctgggttatgtctgatcgttgggcggggagggggctttaaggttctaatttttgtatgtgtcctatttccatgtcttgtttcccagataaactatttccttctatgtctctgctttcctgaagacaaaggtacctttttctcagcagtggagttggagaggaaacagattcaggaagagtccaatattactaccattattgcaattgcgtagtagtacatgccaaattcaccctgtcttttcattttacttacctttctcttgtcccacatgcttttattcttggcatgcttacctacaaaattatcctttttttctatttccgtattccctatgccctgtagtcttctttcaaagcccctttgaaatgctatcatgaaagayggatttcttttctcagtgctgtgagcacctccatctcctcttctcttctttcacggtgcccatttcttcttcatctcatcaagtatgcagtcctttcttcgtctgcactgttatgtacctccttccacctttgtttcttccaaacttgtatttcttttgtctttccatttaacaggcctcatttcttttatcttaggaatctattcataaaatttatacagtctttaaggtgcaaacaccttgaaggtagagaccatattatttctatgttctttatattggcactccaattaaacaaaagtctatgtccagttgaagtctggaagcctgataagcacactgaagtaaaagtcgcaatacacatgaatgactgaaagtaggttttgttaccagtggaaaagacatttgtgagaacaaaatgacacataaagaggaagcaagtgattactgacttactggaaatcccaggccgggcacggaggytcattcctgtaatcccaacactttgggaggctgagatgaggggcttacctgagctcaggagtctaagaccagcctgagtaacaagtgagaccctcttctctaccaaaaaataatttaaaaaaaattagccaggtatggtagcccatgcccatgcctgtggcctcagctactcaggaggctgaagcaagaaaattgcttgagctggagaggtcttccagcacctgaaagacagagaaagaccctgtcttcaaagaaaagaaaagaaaagaaaacccatacatttagctcaattgactaaaagcctaaatgaaaaatatatatctttcagcttaaagggttggttggattgatttgttgagtaaggtattactatttggacaattgtaaaaaggacctgtgaaagccatattttggcttggacaagctcacccaccccatgccccatctctactaagggggggtgggattcactgtcaaaagagttcttctctttaaattctatacaataggtacagtaattatatctaattgcatttgaaacacaatagttattaaggcaaacgtttctagactagtttcattattaaataaaaattgaaactgagagtttttcccatattggtaaatattgwtttaattttttaattgaatgggaataatatgggcatttttttatcatttgcccaaaatattttaagaaaatactatatagtgtaaccttttttttttttttttactatgaaggcattaattttgttttatttttagtacttgcttccagttcacttttcaaagtgtcctttaggcttgttagtttcaaaggaaataatatatttccttttgacttaaaatgcctatgctatcattagatattaatagtagaagtaacagcaggattgcctggcacaaatttgtcctgtccttcttctggctaggcaatagggtgcaaatgttccttgctgtgcttttgatggtgaaatagaaataacgcttcacattttataacacattatatttcataaagctctttcacattcatcacttcatttaatcatcaaaaacaattctgcaaactgatattatttttcacatttaagtgtgagaatattgatgctcaaggaagcaatgatttggctgaggacccaaagtgagtgtcagtgccaagacttaaatctatttcttctcactcactccagagtccttcccacatcatcacactgtctccttctactgtgctttgctctaacctgctgaactaactagcaagtgtctttagcatactacattagatagctaagacttactgaatgcctactgtatgccaaatcctgtcttaagaacttacatgtgttacctaattcaatccttgcaacccatgtatgataggtaatattattatctccatctcgcaaataaggaaacatagaatttaaataacttgctcaggaaggcatagccaataaatggaataagtaagtctcaaatctggacagtctatcttgagaaatgcatgcttaatcaccatcctctattgcctcttaaataatcaaagcccgtaaagattttataaatgacttttctcatgaataatagggcctggggtgagtttctcaatatcacttayggcaataagaatttcagcaatcataatcttggtgcattttccaaaaaggatggctccccattgggtaacacaaggtgaaatgtgtattctgttagaaatttttgattccagcctagggaggtatcaagaataatgctgttgccataaagatataagtcttgagacaaacactggagaggttcagtcattcaatcaactatacatatattactgaacattttttatgttcaaatgctgtgctaagtatctgaataatattcacatgaagctgaaaatctatcaaaaatacatttgaatacagatacttggtaaaatctctaaaatgcacaaagcttcatggacacatgaaatttctttactatggagaaatcaaggaaggtttaataaaagtagtaacattagagctaatctttgggtaaagaagaggaaaagacaaattgtagtgcatgctgtaactgtatataggttctttggagatagctcattgaatgcaaactttcagaactcacttcatgagtcaataggaactttacacaatggtgagaataaagtgcatcctttcaaagcacactgtccatggcgtgagagtaaccaccacactgacatttgttgaagaaaggttctcctgggttctccccactctaccctccttggatgccaattaggcaccttaggaaggacaagtgtcttccctgtcccaaagaattgatttttatagatatttatatctacttttgtgaacatgcaatgttcattttgattattattaaatcaatgtaaattctgaatgaatttctctgacttttactttgcttattaagttgaagactcaagggcaatgcagatgagaatttcagattcttcctttgagaggatttttggtcagtggctctttaagaagacccaaagcaggttgggtatacttcgtaaaatcagatacttggtatatagttcttttttttttcttttctttttttggtaacatcaccacgaggatttctttgctgaaatgcactgaccttctgtaaaaattaacactggaagtattttccaatggaaattgactaataaagaaatcaataatgaaggaatatttttagactggcaagaatcatgatgacactgttaagaagaaaacattgtacatatttaatatgtttaaattccagatcctcaatattatgattaagaatttaatgatttttgtttataattccttctcattgtgtgcccacatcatacttagcttaaattatgtatctaaatatgtcttctctataaagtttcttgtggtcagaatcaagtggtccactagtttcatttagcagtagatgtatatattttgacacataccaaagaagtgcagctcagtacccaaaagatgtactaactgaaaactttagttcatgtaatatgcccggcattcaccctcgcggaatttagacaggagggattgtggcctgtatgtttgacttctggaacttaccttagtaaaattcaaaaaacaggttcattagtaatttcttcaaagaaatctgcttcaatttattcagatgttttgtagtctctactttgtattaaatataaagcactgagttaaagaggtaaaaatatcaaaatgaacaggatagtctctctcctctgggatcttataatcatgtaaagaaacagatatgtaaaaactgtaaaaaagatatgtacaatataattataatataggaaaattaaaggccatacattttgtaaataaacagctatgggaacaaaaaaatgtgcatttttttttctaattggcaaagtctaaatgggattgtggaggagcagtttgtatttaagcctgcaattgaactacatgtattatttttaaaactggagatttgaagggaacactggtggcaaatagaattgtatgaacaaaggaacagagatttggaaaggcagatggatgtcagcatggctagaggacaggtacacagctgatggggcagaaggtagctatgaaaggtttgcagaagtcagattgtcagtttcttttaaagcctgctaaatgtgtacactttattgtgtaaacagtggcaaacagtaaaggttttgaactgtaatgatgtagtggtctgggctaaactattcagagcaagcattttaggttacagtaactgaactgtgggtttttgtttacatgtatccagagttgttccctacctttgcaaggtcagtgtctcagtgatgtgccttaaataccttgtccttgaaatagaacctcaacatcttcaccttgttctttttttttaaaagaccgtgtcttactctatctacaggcatgcaccaccatgcctggctaatattttatatatttttaaagatgggacctcactctcttgcccaggctgatcccaaactcctggcctcaagcaatcctcccacctcagccccccaaagtactgggattacaggcctgagccaccatgcacagacttatccctctcttaaaaaaatttgttttcaacaaattcatatgagtaagattaagaagaaatggtacaaccagacataagctgaaaagcaaaagtctcctttcctactttgtttattttgcttcccctttcagaggaaactacatttgatcattaaaccaatacatcatttatattcattttttcaaaatatattaggttggtgcaacagtgattgaagttttgtcattgaaagtaatggcaaaaaccacacttttgcacctacctaatataaaacttcatttttgttttgtctttcatattgatgaaccatcatytgtttatttttttggatattggattgccttcattgttttcactattataaatacccctattacacatacaaaatcaaaataccatttttgccttggctttttaagaaaataaacgttgattttaaaaacaatttcagatatacagaaaaattgtgaagatactacagtgaattctcatttccctctaccatgttccccctattatgaacatcttatattagtgtggtagatttgttacaataagtgagtaaatatgaatactaattattttttattgatatctgatattatttggctctgtgtccccactaacatctcaccttgaattgtaataatccccacatatcatgggagggacccagtgggagataatttaaccatgggggtgggtttttcccctgctattctagtgatagtgaataagtctcatgagatctgatggttttataaaggggagttcccctgcacatgctctcttgcctgccaccgtgtaagacatgactttgttccccctttgccttctgccatgattgtgaggcctccagagccatgtggaactgtgagtctattagacctctttcctttataaattacccagtcttaggtaagtctttattggcagcatgagaaaggactaatacaatatcaatagatgttgatatcaattatttttatcataatttattcagattttcttagttttcacctttgtcttccaggagcccatcctggataccacactacatttattcattatggctccttaggttccacttagctgcaatgttttctcagacttcctttgttttggacagccttgtcaactttgagtaatactagcagggatactgatgttttcctaagtaccagactggcgttctaggtttagtaaggaagttcacagaggtaaagtgctatgcatgatatcaagtatacatattatcaacatgactttacaccattgatgttgaccttgatcactgggctgaggtagtgttgtcagattactccgcctgaacatcattgacttttcccctttccattctgtactgtttgggaggagctcattatacacagttcacacttaaggagtcaggaattactgtccacccactggagggtgaaatatctacataaattaattgaatttttttttcttgagatgaagtcttactctgtgggccatgctggagtgcagtagcacgatctcagctcactacaacctctgcctcccaggttcaagtgattctcctgcctcagtctcttgagtagctgggattacaagcacatgccaccacgcccagcaaatttttgtatttttagtagagacagggtgtcaccatattggcaaggctggtctctaactcctgacctcaagtgatcctcccacctcagcctcccaaagtgctgggattacaggcgtgagccaccatgcctggatggaattcttttgtatggcagatctatttcttctatcccatttatttatttattaattcatttatttacatcaatataggcttatggatattcattttatactttgggttaccatccaatatgacttcactttgttgcttaaattgttccagctttggccactgacttctgtgcccctctgacgtttcccatcagtgtgggatttttttttttaagcacttccttactttctggaacgacatgattctccaggcttatcttgcatattttctgcttcaacattaggcaaccagttcttcaaggagctatgactcttttaattggggaacagaacaaaagccaagacctgagtgctaagtgtgattgttactattggggtgcccttgcttctagagcttctcagctgataaagtaaagaaatttatgtgtgtatactaacttgtgcctgcgcacctatctataaatatttctatatgtaaacttctgtgtctacattaagctaaacatgagtacattttggtgtttccaagtctaatatattaccacctggttagtctagcctattccccttgtttttttctgtaaaatcctacaccaaagtgagaaacatggcttctaccttcctctatccattcacataattattaaattctattgtatgcttgtagctgaacaaaatttttaacccatattgctgtaggaaagacactttatcaactagagagtttgagtttatgtgcagttcctcttccttttagacttacagactccactcatttccaaaattactgttaaccacttttaccttcagtgaggttgtagtgtacatttgtgatayagttatattcttttggaacagcctgcattccatcctgtgataaatatgtattgcaaactctaaagaaacctttttaaaatgactaaaaagaagattaaagatgcagtgatgcgggaaatcagtaaggatataaaatcagtaatttgacctgaacagcactatcaatcaatttgttctaattgacatgtatagactattccatccaacaacagcagtatacacattctgctcaacctcacctggaacattcatcaagtagaccatattctgggccataacatttatcttaacaaattcaaaagcgtggcaatcactttgaggaacttttccagagggtataaggaaaggacaaacaaatgaaatatagaaatgatagaaaaagtgaaataaagagaagacattgtaatgttaatgtccataaaatagaaatacaagaagcattaaaaaataaataaatcaaggatagaaaatatttgaagaatattgtattcaaatatatcttataatttttgaaattataaaagcattaagaacccaaatttgagggtttcataaatggttaacaaaataaagaaaataatcctttacctagctacattattgcaaattttaggacataaaaggcaaagagaacaaaacaaaacattcaaggagggaaaaagaaacaagtattcaattgttatatttctcaccagttatggtggatacatgaagataatacgttactaaagaaaaagtgctttaaacctgggaatttatattttattaaaatataaaatattatttaaatgtgaaaatgaaacaaatttatttttagtttgaccacttaagatgtgctttgaaaataccattgaagatgggatatccataaaatggaatattattcagcaataaaaactcatgagttatcaagccacaagaaacatggaagaaccttaaatatacattcctaagtggcagaagccagtctgaaaaggctgtatgattgcagccccacgaccttctgggaaagggaagaccatagagacaataaaaaagatcagtggttgtcaaggattcagggactggttgaggatggagagggcagtggatggggagggaaatgggtagaacacagggcatattgagggcagtgaaactattttgtatgagactgttatggtggatacattgcatcatgcatttgtgaaaactcataaaagtgcacaacaccgagagtgaaatctaatgtaaactatgacctttaattagtaataatgtatcagtgttggttcagcacttgtcacaagtgcaccacactaatgcaagatgtgaataatagggaaaaactcgggagggtgggggctgggggaaggtgtagaaggaatacatgagaactctgtgcttttggttcaacttttctataaatctaatactgtttaaaaaattaaagtctgttgattaaaaaaaattacaccccagaaagaaaatatatccaggagaacccaggaaaatatgggaagtatggatgagaaaactatcaaagctatcagtaaggtatattacttataaataaacaagaaacaaaagagaaaaagcattcacaaaacaatccagactaacaattctcaaagacagaaatgtggtgtggtgggaaaaatgggatggagagtgtgaacaaagtcatgatgagacctcacagaggcaaaaatgtactaggatacttgtcttgggggcaatataaaatcatgtatataatttaagggtaattaatacaagtgttcatttaatacagtgggaataactaaggaaaaatagaatttgagaatataattctcaaaccagaagaagaaaatttggtatgaccaatgaaaggaagaaaagaaaagaaggaaaaaaagaaaggaagaaaacatatagagaaggaatagaaagggaaagaggaagaaataaaggaaaaagggaagggaggaagaaagaagggagggaggttggaagagaggaaggaaggagggagggagagagggaaagccaaaacaggcgaggaatgatgagaaggatgggtagctgttctgtggattgtgtgagttaaggggaaggaagtggtgggacttaacatcagctccatatgctacagagtcaagtatcctcacatattcttacattttccctgaagttatatattgagagccagtggaagacatcgtagaaattccctggtctattttgtgaatgtgtcttgtagtacatagataattacatgtgagccattcctataaaaaggtttagattggtcaaggatgaaagaaaaagagacttgcaggtggaaaacaaaaagggcaataaattaaatctttcaaaataataattgctgaaaaatagtcatcttaagaacctcatataactactagtttaaaatattgccatccagttattgaaaaaagcaatttttcacatcaagaatttttatttatcttaaaatatttcagaggcaattggtgttatgctttagacacttgactgacagtaaaagtttactataataattcaaatgcctcttcaaagtggatgaacagaaacaaaacgttcagagaggtgagtgttaaattattattatttagtgggaaaatgacctgaactattttctttggttgctgttacataatccataatctgatatcagttccattttgttgtttgtatttgtgcttgaactttcaatacaatagaggtcactaatggaagcctaaaaaagaatttttatttgacttttggttcattagaagtttctttgttctagttattttccttagcagagtgaatttctctcactttctcactatttgtccaatttactacctaagcctggatgtttgtcttttcatactctggaaacatggacaaagacaaaacatagggagtttcgaggcattattcaataactacctagagaataatggctctattttatatgatctaacttggtcacttgaatgggtcatatttctccaatattcacagaaccacctaagttgtttttggttgtgtggacatagatcagattgcctttgaatcatgatttgtagatgtaaacactatttattagttgtaaaaactttatattatctttaacagcctggccaaaaggtcattattgtttaggccttctgccttccagaaagagtatgactaaaacagatgtattgggcagaatttccagaaataccccaccacccccaatttcacagggctaatatccagaatctgtgaatgtgatgtcttttcattcccatgattgtcttatgtgatatgacgtagttgaccctgaaagggtagggtattcctggcagacctaatctaatcacagaagctgttcaaagcagagaaatttctcgtgctagtgacagaagacgaaagcatcagggaaagtcagaggaattcaaagtgtataaaggacttgagctgttgctggtttgaatacagaggagccacatgagaaggaaggtgggtagccatgggttgctgagagagagattcacagctgagcatcagcaaaggaacctggagctcagacctagagccacaaagaactggattctgccaacaacctgaatgatcttgaaagtggtttcttcccccacattctccagattagagcccagtaagccatcaccttgactttgaccttgtgataacttgaccaaacctagctaagctggccaggacttctgacccacagaactgtgaaataatacatgggtgttgttttaagccattgagctctggtaatcagtaatatagaggcagacaataaatatagcatctaaaaccagtagtgtttattttgagatgtcaaagaggatcccattctggtgtttgatatttcagagtgccaggccatttttcctcacatcccactgacattcctcttgttttgatttaaatgaatagtctcccttagatgtcccagacaggattataagtctctttccttaaaagtttcagttgttaagatatgtagcataaaattgtatactataatggatcttgtaaatctaaccatttgctaaggtaacacaggttgtaggaagcaaatctggtactagaagccaagatgaaggattttcaacctagtgacctttctactcaaaagccatactggctctgaccttcatattttaattgatcaggcaaataatctcaaatcctccaactttgtttgattatttggctaattctgctcagaatcctctctaaatatctactggaggcagggacattaactgaatttgaaaagcaatattatggtaagactctctctaataataccataaaataccatagcaaggttgtttttaacagataattaaatgaagtccaaaggaaataactagcttgcccaaggttactctttgcaattgagaaaactgaggcttgaataggtgtaattattcattcaaatgtcctcggccagttcatggcagagatagaaagtcgatccacatctcttgatttccaattctttttttacactgagctatgtcaatatgtcaattctatagggtttgccctcagattagtttgagaaataaagtatattcacagcctctgtgttttcagtgtactaccagctgggatatctatgacttagttccaagctgtgatattctctgggactacaaatttttaagagccattttaaaattggctagaaggcaaatctagggtgcccataatgactgtacccagccctgctatgagtgactgcactgtgatttattccctactcagtgcccatcccccactccaaagccctacaggatttaggaaaaactgctggaagaaatgctacatcatgaaagcttaaaaaggctcagggaacaccacacttgaatcagtataggtgggactggtatatttcttttgctatttcattatccattttgcagttcttataaaaaatgagtctgttgatgtagtcttctgaagcattaagatatatgctatttctgcagtgaacaggctgcttagtgaagaagagtgtcggctcacttttgttctttcatatatttattagagtacgctttcccagagtgtcgattgcatgactttattgaagctagtttgaactcagactttcccccactgaatctgagatccactgaggcccagacaccaaggagctgttacacatgtataactattccattcacacctcttcaggagtttcaaacaagtttaattataagagaaacaaaagaaagcacttcttctttgccactgctaggaaaaaaaattgctttgcttggaaatcaattcattgtaagctttaatctgcctagttcggtttctcagaatgaatatttcaaatattaaatattttcttgagtagaatgtatagtacatattttatactaatatccatgtgtgtgttagacaattaagaagactggagtgttttccaaaaacttgaaaagttttcggtgactcgtaatacagaagtgacatttttatttgagaacaatttaccagattatgtcaagttcattattggtatgatactaattatccttaggataaattggaaaggggaaccctctgctagttttctgaagagctgcgtaagcctgatgaaatgtcttttctctttctgtgactcaaagctccagaaaaatctgcaaagttgaatatcacttgtgcctgctaatcttgtgtcatagttattttctatcactgtcataatgtcagagaagcactgggaaaatctgcacatcactcatctctccttcttcacccttatccaggtatatccacatatatccaaacatccagaaggtcacaggtgggatatttttgaagatgtactcacttcagcacaggtgaacctgttgatgacttccaggtctaaatatggtgaccttagtcacactggttatttttagggagcttcctctgactcttttataaactcaagatgataaatgcaatctacctgtaagattcttgagaaatttgtgttgtataatatgaccgtatatgatcccagtagttgtgtggaacttgataggaaccacagtaagtatcacctctccttgcttccatcattcccctactccaacagtttcatcttcctcttctgtttctagtgaataaaacatagtctgctgattttaaggtatattccattcccagttgtatacacaatggttaactttacattcgtgcaatcagtcagtcaacatttgagtgtgtactctatgtcagatgctgttttaggtgctaggggcccagcagtgaacaaaacaggccattgctgtgctggaagtaaaattctagttgggggagacataaaataaggaaataaataagtatataatataaggtaatatatacaaatgaaaaaaataaagcaggaaagagggtagggttttggggggaagaggatgttaaaaagttctaatggtctaggtatggctcattgacatagtgacctttgagcaaaatcgtgaaggtgaaggagctttactctttgaatcaggatgtcaggtcttagtttagactcttcagactagatcttagccattgtttatagatttgcttaaatgtctaattctttttcagctgattatgttggagtttattgttcctaatgaccaatatgctctaccaatgtcagaggcctgattgacttttgagggacaatgactgctccagtttatgcactttctctccccccagccctcccatccctcccatcctcctctgcctaccctccccaccccactcactttttggggttcctttgtcagctgtgtattatggcaaggatcgacattttcttgacattcattgtagagaaggtgatgtaatctctccttggagggtggtcacctgctgcttgcaggctgagctaaaagcagattctctcaatgacaggtatgactgcatttcctgggcaccttcagcaaacaaggctcttgcaacaatagcttgcgtcttattcttaattacttcataccccaaattaggtgggctaaatatctttttgttgtcacagaatggaaagcacatcataattagtgtaaaacaaatatcctcatagggtccaacatgcagtatcctaaaagaaaacgaagtaaacaatttatgtattttgtaatatacatggaatatgccattaggttgttttgcaaacccatgtaggtgatcctggtagattagatttacaatatatctttcctttcacttcattctctccatcctctatccattaatttttcttatatctagaaatagggcactaaagaaaactacagtatacagttcctgctttctctgaaatcaactattaacttcaggcaagtggaacacatacttggtacattacttttttttaaatccctgtattgcataatagaagagaatggtaatttttatcatgccattaatgtgattcctttctttattgcttaaagtgtcaatcagtcaaattgaaatgggttattactctgttatcttcttcattttaattatttggctctcccagcattacccttcattacctgttctccagaggatttgttttatctgaaaataatttactgcttaacatcgatgcatttttctgatatcgttaggtgggcctggtgttacatttagagagttaccgtcatcagagtaagaggaaatatatacagtgttttatcttgcagaacttaatgtaccaaatctgatgtcctataatgtttcagagggatgatacaaatcatttgcaactagaagctgaatattcagccttgtcacaagaattctcccttattcaattagattttttaggtgtttgctttaaaaagtaatatcagattagtaatggggaagcaatctttgaaatcattggtgggccaaaccatgataataagatacaaaagagaaatgaatggtgggaaatggcagacacattacacataaacattgttttgttatggcaaatctctacggcttctcaccacgatgtcagtacggaagtttgaaagaaaaatgtatgcgtctcccgtagagcccatgaacttgttttcttttgcatattatagaatctgcaggtatttttcaaatgaggaccacaaacattcaagtattaggttttcttacaatgacagccaatttagcaagcccaaggttttagagcatccttcaagaggcwggttccatttgcacgttcatgttcaattcgcaaagcaacagcagcagcctttacgtatcccacgattaacacttcaacctccagcccattttgtaaggttaggcattcatcaaaatgtcagaatgattacagtacagatctaaaatcccttttgtcagacactggactttaatccgctcttttctgtagtcacgtcctgtcacttttgcagctgacaattattgtttttggtcaaaaaattgtaccttgcaatcaaaatggcttgttatccaaattgatctctgatgctacaaaatgttgtttgtggacaattctcctgagcaccactctccctctcctccagagtttacagttgaaatggaagcaatagaaagtcaggagaacagggtggggctgaggcatgcctggtcttttcactgctaggcttggatgcctaggaaatttacctggaggcttctgagtaactgaacctctaaaagatattaaacgagactttttcactattttattcatagtttgtgcttacttttaagtgagcttttgttttggaattaaaccctgacagtcagtggcagctagaatcgccacctgtcaaaagtaaggtttccagtaaacaaaatatttacatatatcaagtgtgagagagactggggaaaaatttaatgggcaaacagaaattcatagaaggctacaaagtctttcttgaccagtctcacttgtaggtcttaagcctaagatgccatattacaggtggatcagcttcgggaggaaagcaagagctttctattggaagcaagcaaacccctctttgtgagtttctttgcatttgaggttctataaattttggagctaaaacagttagtcccttatttttgtttcactgaagctgctgaatgctaataggttattgatgatggttttatttgccagccatgaaaaatgcttggacaacaggacatgcatgacagttaatctttgtagagagaagatgagcatcagtggctgaattaggtgcggagggttgcagatgatatttaggaacacagtgacatcaagggagagggtagcccatggaactgctggccataaatagttttaggcatactaaaaatatcaggagaggataggagagactatgtggaattgctttacaagaatggcagcttcttaagaattataatgagatcagaaggtacaatgcttttcagtacttagaggtttttttctagatggaaataagcaaaagtagagaattaccagggtttacattttgtctccatcatttatagctaattgaacatgggagaaaacgtagcttccttctaaggctcagcttcctcaactggaaaattggactaaaaaagaaccatacttcagagttgttaacaggattaaatgagataatatatgtcaagtgcctagctcaatgtttggcacctcagcacatgctccagaagtggtatcaattattattacataacagagataatatttggtgggctatgtgtatttgtgagtgagagggagaaagataactgttttttttacgcatttttgtgaatgtataactttctcccaactcagctgaagcatccaccatggagagaagtgcttcaggactgttaccagagaaattgaatgagaaagagatgaaaccattttttaacatccctaatgggaattttcagtgaatggctagacagtaggcataaaagccaaactgtcatcagggaagagtctttatacaatcaattatcaagatgcctgatggataaactagaccacaagtcctgcaggaggacttgctgggatggataaagtaaggaggcagtaggtcatcccttctgttctgaggaatgtgagaggaggacaggaaggtaggaagggcaggagagtcttcctttgcagactgtatccaagactggaaagaaattttaaattagtaaaatgagataccagcagcaggaagaggaaccactttgctgaccaaccctatacccactgggtaaagggagacagagcatcaaagtgatcccagtgatgtcatgtagataggcacagagaaaatgttggtgcttagctttcttgagcatgcctgctaataactggcatggatgggactgaaaagttcctgggttgcctaaataaaatacaaaggtgataactgctaagctgtgccagtatgaaatgaaggcaggccaaggcctccacagagaaccaccagccctgattaaactataagagactggccaccagattccagcatcagatcccaggtagggcgccatacaggagagaacctacaccagggactggcatgatctcagactcccatagatttggaaaccctgtctgtccactaccctatcatctcaaaactcactacattctgtacactcagtgcaatctttgaggggaacagagaaaagagagaaaatgggaaatgatgggattaagctaaactgacatgatagactaatcctaatcctattccctccctattcacctctgtcatcaccagtgccacacagaaggtgggagtcatgagaaagacacaatgcattgtacataaaaggaaaaaagctgtgtcttcaccaactcgaaataggaaaaattgtgaccctgtgatgacaactattacagctgtcataataaaatcaagatgatggctgtatttctcaggcctcacatcaccttttcttttacaaattatttgaaatttaaagtagttttttctaattctgtgaagaaagtcaatggtagcttgatggggatagcattgaatctataaattactttgggcagtatggccattttcatgatattgactcttcctatctatgagcatgggatgtttttccatttgtttgtgtcctcttttatttccttgagcagtggtttgtagttctccttgaagaggttcttcacgtcccttgtaagttgtattcctaggtattttattctctttgaagcaattatgaatgggagctcactcatgatttggctctgtttgtctcttattggtatataggaatgcttgtgatttttgcacattgattttgtatcctgagactttgctgaagctgcttatcagcttaaggagattttggtctgagatgaaaaattcatcctgctaaaaatgcttgatctggtaagccaagtgctagagagactagaggagccaaggaacacgtaggtagggtgagataacagaagaatacccaagctgaattgaaaggaggaggtgcaaagaagcttgtgcattggattaggaaaaaatatagactttgaactcacaaggacttgatttttttccaatttgtcgtctcactctctgcataacctctattatgagttgaattttgagccccccaaccccccccaaaaaaagatgttgaagtcttaaatcccaacacctgtgaatgtgaccttaattggaaataaggtctttgcagatgatcatcttaagatgaggtgattaggatatatcctaataccacatgaatgtatctgtgtataaaggggaaatctgaacacagagacagacaagtccaaagaggatgaaggcagtgatcaaggtgatccagctacaagccaaggaacaccaaagattgccagcaaatcaacagaagccaggagagaggcctgaacagattctccctcacagcatgcaaaaggaacgaaccctgccaacaccttgatttcagacttctgacctctagagctgcaggatgataaatttctgttgtttaggccacccagtctgtagtgcttgtaatgtcagccccagcaaacaaatacagcctctcaactatgtctcatcggtaaattaattatttctccccaactcataccataaaatattttagacagcttgcacaagcccccaaacaaaaaaactgtgatgaaatggctaaatagtgtagtagccatggygtatacgaatataaacagaaacatcgtaacaggaaaaaataagaaagtccattagatgcagttgagcttccagcttgtctcttagtttcctggaaaccaaagtgaaaggaggtacctgtttggtcagaaaagttttagtattacaaaggaaatagcattgtatttctttaggggaagcaaaaactttttcttagccctaaattctacaggcagtgctgaattgctcagtaaacaatgcacttaatgatatttccttggcaaatttggtgaattatccatacactggtgtgtatgtataacatggtagtgcaacccccaacctgaaggtgacacttgtgcgcacgtaaatctctatttcttagagatgtcaaatcaaatcttataaacataagaaagctacataagcatcacaaaaaattacaaacagctatgcctcattttcataagtgatgtcctgactctatctgatctagttttcatgtaagtcctttgccactttacatctatcctcaaaagcctaacggaatctggctggataccccaggtgcttcctcaacgtagaagttttctcttgtttktttttttttttattctgagttattttgaatatatcagtcaattttaatctaaacttgcattatgttttcaaatacaatataagaatttaattaaaaacaatgcttcactgacagcagctctacaattctgtatttgacattgtagtacaacatgcaaaggcatgtattgaggtcagtctgaaatgaaacacttagcctctatattttttggaaaaacaaatccaaaatatgaaacattcagataggtaggcataacattcagatgtccagtgatggaggtcttgctttgaggggcaggctgtttcaggtataaataaatctctcaaagtctatttaggaaaaagatatatatatattcctgcaacttcttttgtttatttttattttttgtagagatggggtcttgctatgttgcccaggctgttctcgaattcctcacctcaagcaaccctcctgcctcagtctgccaaagtgctgggattacaggtctgtgccactgtgactggcctctgtaacttcttaattctgtctgcaggagccacatggaataatttatttagtgctttaaatatatatatatgtcactaagccattttaaggaagataatcagaaaataattatcaagctgttttgaccaatataattcagattctacttcaaaaaattacaagagattgcctgaattattttttatattaaaaacatagcaggcatatgttacacaatgagttttgttctgtctttcatttgttaatactttcttaggatgataatagaaaaaaaatttgagaatttatctttctctgtaccatcaaatctacagttttccgttgtttattctcagtcatttccattcccaatttaaatgttggatataataaccagccatattaaaggcccgattctatgaatagaaaacatgaaaaaaaatttaagcgaggatttgggagatggtggtaggtaactgaacttggtaataacaataaaatgatcccaatcagaggctgttgtgtgagcacagcctgtacaattaatagtgacacttcagcagcaaagccactccaagaatcataccatcgtttgccattttatatttctctccaagattttccagagaaatgccatcaaaagcacaaatactatttctaggattccaaactctaagaaacatattaattcagaagatgttaaagcatcaaaacagagaggaaaatgttggaatggttactatttatgactagcttctgctctctgcactgaagagcgtagctatttccttcattttacagttgacattcagaaaaagtacattaaaagtacccagaaaagccttatctctgcatatttttgcaatttggaaggacaaatagaaacaacattagaacttgatacatttagtcgtactctgtattgtagacttggagtggaaaaactgtattgtagactcggagtggaaaaaacacaaactgttttccctccgctctcacaccacaacaatcaacacagatgacttctgtgaccaaatgtgtagcagcttctccacaccaacaagcaataggcaatcaatcagttctgcagcagacaccagctgggtgtcatccagtttaattccaacacagcctggatggagatatcatcagatcccacagcttaaaggctcagtcccacaagaccaccgttcgcttcacatggcagtcacaggccctgggttgttttacatgcgcttctgaccaattgtctataaatcagggttcccatgaccccttccttgtgttcaatgaatttgctagagtagctaagagaactcagaaaaagacgtgactcagtttgttgtaaaggatattacagagtacagatgaaaagatacgtaaggaaagacatggggcaaaggatgtggagcttccctcctgggcacaccaccctccaggaacctccacacatttggctctccagcagttgtctgaacctagtcttttttgtgtttacagaggcttcattacgaaagcatgactgacaaaaccattggctattggtgagcaacttaactttcagcctgtctcccatccctggaggttgggggtgggactgaaaatcccaaccttctaattctgccttggtcatcttttggtgaccagtctccatcctaaagctacctaggggttgccagtcctcagtcaaatcattagaatatgaaaatatatcattttggaaaccctaagaattttaggattgtgtgccaggaaatgatgtcaaagaccagatacatgttttataatatcacagacacatgcataggttgtccaattttttctaagtgaagttaaaaagtatttcaaccccaattgtcctattcttcccttacatcattccttcctatacttctgtctaatgtaattaagaagaacatcgaggggaaacaacttttacttgatcagagaattaactgaactattcacttcccaagtgttcaactgaaaggtagattattttatctcatcattttaggattccttttcttaactgatttgttgtttatattgagtaaagtacaccaatattaagtagtacatcttgaaaatgttttacatatttaaaggtaatagctattgtattttctattaccctatattaattttgtctgtttatgagccaaaaatagattgttgcagaaaatatgtactctttgtatcttatttctttctctgagtaaaatgctttttattttcatctattttctttcacacagcagtactttatcttcttttatattccactaaatgtatgaaatgtatgttgttttttcactgtcatgttgatggagatatgggatgattccagccaagggctgttacaaataaagttgatataagcattcttgtatatgtcttttggtgggcatgcatactgatagaagtggaattgctataggtagatgtatatttagctttaattgatactgccagactcttgcaaaatagttgaactggtttatattctcactgacaatgtatgagagttccaggtgctccacatttaatattgtcagtatttttaattttagccattctagtggatgtaagttggtatcatattgtggtttttaatttgcatattcttgatgactaatgatgtttgggacattttcataggcctcaactgtttgaatatctttttagtgaagatgttctttcgattttttgccctttgaaaaattggtttgttcatctttcttattgatttggaggagttctgtttttttttgagacggagtctcactctataacccaggctggagtgcagtggtgcaatcttggctcactgcaagctccgtctcccaggttcacaccattctcctgcctcagcctcccgagtagctgggactacaggtgcctgccaccaggcccggctaattttttgtatttttagtacagacgggttttcaccatgttagccaggatggtctcaatctcctgacatcatgatctgctcgccttggcctcccaaacagcagggattacaggcatgagccagcgtgcctggcatggaggaattctttttatattctgcttacaggtactttgtaatgtatgtgtacaggtactgtgtaatatgtttttccactctatggcttgcctattcactttattaataatgtcttttgatgtacaaaatttctttatttggatagagcccaatttataatttccttttttgtgtttagttctttgtgtttgtttgttgaaactttgcttacctgccaaatcacaaagatatttttctactcttctagatggttggtgttttagttctgtgtttagatctgtatccacctggtatttacttttaattatgatatgcaacagggaccaaggtttttatttccacacagttgctatagtaccagataaccagtgctatagtaccatttattgaaaagactatccttttctcccattgatttgcagtggtgactatatcataaaccatatacctgtgggtctccaggtctatttctgtagtttattatgctcgtttggtctattctgttatctttactcattatcaaactcctccagcttcttgtacatgtttaagattgtctttgttattgtacattatttccatttttaaataaatttggaatcagattgacaacctcctccccatgcctaccccccaaaataaatcttctggggttttgaatgctattgcattaaaaccgtggatgagtttaagtttgttggaaattgacatcttaacaatatatcaagttctgcagcctattaacatggaataacatctgcatttagttagttcatttctttcactaatgtgttctattttggaatagatgtattatgcatgtttcattagatttattcctaagtatttgtttttgatgctatgctaaatggtatttttatctcactataattgttattattatatgaaattcatggatatgaaatacaattaatttttgtatgttggcctagccagcaaccttactaatttcccttattagtcattgtttctttagtattgtttatgaccatgttatgtgtaaataatgatagttttattttttcttgccaatttttgtacattttatttcctttccttgctttattgcaatgcttcattccagtataatgtggaatgggtgataatagacatccttgtcttgtccccaccatcagaaatgcactcagtctatggtatcatgttattaattctctagtgaaaccatagtttgtatttagtaaaacaacaatgtacatttggctatttcaagcttaattgaatttctttggcctctacatgattcttccttgctgaaaaggataatttataacaaatatttcattacttataaagcaaacacttgcatttcagaatacctttgtatttcactttcaactctagaaaatatttgttaggaaagtataatttatgaactgttataatgctttagtttctattcatttatttgggatttaccatgtattgctttaaattttaagcaatttttatatgaattgcttctactctacactatgaacacaaattcaaagatagcctgtatttgtattaaatttctttgaatctcttaaggcaactagcataatgccttgtctcaataaatatatgtttattgctttagagaaaacaagtccattactattttcaaagttgaaattgcgttatatgtttaagctgccatttaaacagcactacattttgccataattttgctatagttaacattccaagtatattcaaagttgatttttatttttttcagaaaaaatgccttagtctgtttggtattgctacaaaagaacacctgagactgagtaatttgtaagaaaagaagtttgtttagctcacagttctgcaggctgagaagttcaacggcatgaccctggcttctggcaggggcttttattctgcatcataacatgacagagaaggtcaaagaggatgcagacatgtgtgaagaggggaaagtttgctaggcatcttagccctgtaacaacccactctggtggaaactacccatttcctcaagaactaatttagtttagtcttgcgagagtgagaacttactaccagaagaacaacaccaagccattcatgaaggatctgccctcataacccaaacacctcccaataggccctacctccacactggggatcaaatttcaatatgagttttgatgagaacaaaccaaccatattcaaagcattgcaaaaagttgaaaaagctctactaatgtgtaaccagacatgtgaacatatataactttgagacatagcacaacacttaaaagccttcagaatcataaaaaatgtatctatcaatcttaatattttattaactcaaattatttttacctggctgcatggacatacaacatttaccctaaatttaaaatagaatgcaaattaatattcattggtattattttcattaattgcacaacatagtgaaaataatgttaacatttttttcctttccttcttccttcttctcttttgctttttttcttacctgtaaattaactgagttgccagatatccatagttatcaatggcaatttggaggctctcagaggcagaagtggttggtgtttttctatttattgttctagatttgggtctgagcacttttataagtgaaactttccaggtattttgttgttgttgttgttgttatatcaggtcttaaactatacctttataaattcttagtcatatatactaaagggcatttaatctcacgactgttatttatgggctttaagtcctctatgcaaagggtaaaattgtccctgtgaatttcagaggtagacattaggtaaagagagagttttttgcttgacttattgcttaagtcagagcgttctctgaatcttctaactcttcatttaattcacttgaaagtatttattaatcaatgtgcctaatacatagatgggactgcttccagtgagtctgtcagtcatgttaccagagcctttatttcttcctctatgccaagcttaaaaaatcagatgatttattttacatgagccacacatgcaaatagacctgtaatgctgaaattttgatacttaaaggtaaatctagtatcagagagctctattaagtggtctagagtatattcaaattacaagacatgcaacttattctaaaatctaatgcaatctactaacagcaagggagagggaactattcagagtaaataggacattgtttatctgaaattttattgacacattaattgacaactccattttatatgacgtatacaatcaactggacctgtttaatgttagtccttagataaaaaataattgtagctcaagacctcataattgtatatatttttttcactgtacctggtacaatcatttcatgtatgaaatgaatgagtccacaatacctcaatatttgaacattttgttttaattcacttaatcattgaaccacagagtctgtgctaaatgctattatctctataactcaacaataaggagatttaacagactcaccatttaatgtgcacgggagcacagatttcaaaatttgtttcagcacaaccttttggattatcatatatttgtaccataaaataaatcatctgattttttactctactgagacggatgcatatgcaacatatttatgtgcatatattcagtgttggaaattaattcataatcatgtatatcaagtgatttggatatttacctgcaccccatctcagggaatcattagagcttgcatttggaacatttaactgattttagttatgtaatgtaattttacacacattaccttacatttcccttcaaattccttctgaatcacactgttctgatttcctggaaacgcagttcaagaaatggccaagagtagaaggatgttataagacattgagtttcgaagttttcctttaaaatacaaaaagtgaaaattccacaaaagtggaatgaaacttgatttatagtgccgcaaagaaaaatcctggaatgtgcaggaaaggaagtgaatgaacttgggaacagctgcaagtaagtatgatgaacgactctgcattgggctagcagttcatctgttccacttgcagctgcaggccaaagcgtcaccaggttttctgcagaaactcaacttggcattttaatggctgaggtgaacccactggtggccagctgctgggactgaaaatcagaagcagctccagtccttccagattgtgaggggaaaggttaaggagagggaagtggtgccttgtcccagacagacgcccattggtcctgagatttcaaaaacaccaggagagagaatgcctggcagtggagaaaccaacactcagccttctctggaagaaagaaaaggcttgaggcaggattctcaagcttcatttaattacgatcaaatagggactggcagaagagcgtagctgcagatttgcagtaactctccctaaaagaacatgagctgtgagagagtgaccttgcagccagcactgatttgacattcacctgtttccctgcttgcattggaataccgctgggttagtttggatcccaaacatagaaaagtaactcctagcaggaggcagaagagagcacttaacattatgcggccaagaggttacactggctgctgcctcttatcaatgggtctttcaggtcctttttgggagcaatcctgggcttcattgccctgcctaaactgtagtttccaagcagtttctcaggcagttcctgttacattctgtgatcctgcctaatacagtaatttgattccagttgaaaacttccattacatacatgtcttgaatcgggagagttagagccttatactttgttcctctgcaaaactgtaagagcatcactgctgtattaaagggaagtgagtggaaagttgcaaagtgagcctttgagttcaagaaaacagatgaaaatgagcccaagccttggaactacagttctaagttttgagtggtggacagagtgggaaaccacgtagcatgcaaaggggagcggaagggcagaggaaggaagcaaggctacagtgtttggctgtgttctaatgtgctctggcatggagttatcgtgagtggaactaatattacataacactatgtatattttggaagatggctgggaaatagcctttggagccaatggagatttattaaataaaaattacctcaagcttgatttttcatctttaccaagcaccatagtaaattggcatctctgagactcctgcgggagccagaaagctggaatcaaaaattcagaaacatgaaatcaagaaagaactgaaaatctgaatggaaagccagtcacaaaagaataagaagtaaaatattctttaattatgtattatctcctacagatcaaaaggaactttccaccatttcattgaacctgtgagtgaaaatgatcccaaaagtatagagaaaataaagaacagtaagcaaattaattcagtttatatactgtcttttaacctgtttagaaagaatttgagaattgtttgatcctgattatataaaaaagatatatctgtatctatgtctacgtatatattaatacatacaaataaaatttctagaaggaagagtacacaattaacagtggttacttctgaagaatgggaatgggatgttggaggagacagatctgtcacttttcattttatatttctctggtgagatcaagggagcatcttactttgtaaatattaaaaatgctgaaatatgtaggttaaaatgtaattaatctacattcctatttttcagaattaatctgacttaccatctggtcatttttgcttgcttacattttttcttttgcaaaactcattatgttgttttgctaaaaacaattaaaacaatgcatcaaactagtaagaaaaaaaaagtctcaaaccacagagaaagactcacaattaccattagatacataaaattctatgatatatttctttgtacatttctggatcaaataatggcaagatggatgaactgatggatagatggatatatagacatgcatcgatgtaggcagacagtaagatcatagtataattgatattttaatttaacagaaggttaaaactgaaattttgcttttagaggaactattgacctcaaataaatgttttattttcaccttaagacgtatctttttctaaaagatccaaagttaacttgaaaaacatggaagtcgatttttttttttttttttattttaacctatcaagctcaattgactccctctcataaaagtggaggcacagtggctcacgcctgtaatccccgcactctgggaggccgaggcgggcggatcacgaggtcaggagatcgagaccatcctggctaacaaggtgaaatcccgtctctagtaaaaaatacaaaaaattagccgggcctggtggcgggcgcctgtagtcccagctactcggggctgaggcaggagaatggcgtgaacccgggaggcggagcttgcagtgagccgagatcccgccgctgcattacggcctggccgagagagcgagactccgtctaaaaaaaaaaaaaaaaaaagtgaagatattgccacaggtctcaggtcctctttccctgcttcactttctattagttttatcagttaggtttacatttactaagtttagagcatatacaatctttttttctttttttttttttgagacggagtctcgctctgtcgcccaggctggagtgcagcggcaggatctcgactcactgcaagctccgcctaccagattcacgccattctcctgcctcagaccccggagtagccgggactacaggcgcctgtgcaatctctatggtaaccacatttcccagttgactactaccggtaataaaatcaaatggattcagtgctcacaactcttcagtctttgggctactttccattcttgaatttttagctgaattcatctctttggctggattttgtggtaaagtagttttttgcttattttttcccccaagaagggcttacatgggtctttttctatgaattattttcctacttgacaatatttacttgttacttttttactttcatcatgccttgggcgcatataatactctcccttcacattttctttccttgaatttgtggagaattttccattttattcttgcagtcaactttactgaaaacaaatctgaaataaaattaatgttattctaccgtataggcgattggctttttagtcccaagatgcctaaaaataagttacccttaacacataatagcttaacttagttaggtctagaaattgagggtttgttttgtaccacattttctagaaagagtgctccttcaacctaaagatttacttagctttttttcaggaaatttcttggattagatcttagaataaatatttattttcatttgttaaattctctacttcaggaatatctgttaacattgtgttggatttttttgtttaaagtattcacttttctctaattgcttttatctccttatctgttcatcttccttcactataattatcttaatccccatttctctgtatcagtaacttaattttcaattgcatccattgtttttctaatttatgtattagtttcataaggctattgttttgagttctttcccccttatatcggtactctcctttatcatctaattctgttattctattattttgtctttgaattttgttttagtgaacttacattcctctattatattacattatattagaattagtagttttgagtaggttggttcatgagtttgtgagtagggtagtttcaagtagggttgagtagtatttttatgtttcttgtgataattttgccaaacaatgaatatttctttttagtataaagatgtctcatggaatatttaggacatgtatatgctaaaatttatttgttgcttatatgaatttcaaattgagctgggtgtctctatttttatattttaatttgctaaatctgtatgttttttataaatttccttccttccctccttccttccttccttccttccttccttccttccttccttccttccttccttccctccctccctccctccctaatctaggaggattttatagttgccatagcgttttcttttctttttgctcatgcttgtgtgtccctaagatgccaagttaggtgggatatattgtaggtggcctcttgactctcttctcaccatactgtttgttttctttacttaatatacagtctgagaactgaatttactttcatggattatctgtttgtctgtaatctatgggaatactgggtgatgaaggcagggatctagtcttagatactctgcagccttttctctgtctcctaagatattttttctgtgcaatgggagaggggtttttgtccaatcccctgggaaatactataaatgaataatttctcaaatttgctgtgtattcttgaatcttcactctcttcaaagagacttaagccactatttcattccgggtaggagcagctaaactaaactaacagaaaagctacaaattacagtggcttaaaaaacaaaggacatttttcttgcttgggtaaagtttcatttatttttccctctatttcattgccatgacttttagggagcagtgacttctaaattgtggttcttaatcaactagagtttatagtttgtctaacattttaaaaatataatcagtttctttactactatttttatattactaattcattaattttcacccaaatctttaagaacatggctctcatggttagggaaagaaaattgcgcaaaggacttgtgtccataccgtttttttggcctcactattcctgaatgtggtttctttcttctaatgaccaaactttaggggactaggactgtgcatctcagaattaaactggtatttctgatatgtatggtttatggttcaatggaaaaatataagaatttttcaaataattttctgattgtaaggatgaatgtgacctaatgttaaaatggcaggacagaaatattaaagaactgaatgatggcatcagctcagccatttagtatttgattttggacttagtttcctcatctgtataataagagctttgcctatgtatttttccaagaccatttcagggttttgcattattttatttcatttggaattaacattcaggtcatcttatagtagtgtactgaataactgaatgttaaatgtcttgctaaaataaatattgggttggtgaagttgaagttttggaataatagctaaaattaataactatagattttaattaatgatttcattcactaactttcaaaagttagacattcaaaaactgcaagaagaatattttttcaagattataaattgctagattcttcctgcagtggaaaggggaacatgagatatttgcagtattaaatagatactcactttcaattgatacatttaataacatcactaaccttcctattcatagtgaaatgagtgatgaaaaagttttttagtaaatattttttactggaacagaaataattttgtagcaggattcataatttgtgtatactgatttaagaatatcattacttcctgaaagtggcattcatctctatgggtagtcattttaacaaggtttttgttaaaaccttccccttcattaacacactttaggaaagtgtcttctaagtcattctatcaaagtctgttgctttcaaatttgattaaagaaaacaaagtattatttgcgtacctcatttttctctaacacatttttctttgcatttctcatattctggattatgtggggatcaaatatgatttaaatgttatgcacaattttgtggtttttcctactaatgaaattttgagttgcaaagttaacattctgccattgttaatatattcttattataaaaagacaaaatttcaacacatttcatttaaagatctcaattggcttttacttgcaattccagaatcgggcagccattagaaccaaaacagttctgaggagctcccaggctgcaatgtggtgcgaaatgttttatggacagaaaatggaaatgaggtgcagaaattggaggtgagattcagagatagctgattggttacagctcagcctttgccttgtttgaacatggtttgaacagttgattgactgaagctaggctgctgtgattggctgatactttactatttgttacaaaggcaaattcctaatttaagctttcaaattgtttaagtactaagttaggttttactttgttacttaggactcatatcgaggtttctaaagcccacatctgatacgatttaacattacctatgtgaagaattactaagcagaaacattttgaaagcctcatgacctgaatcgtattaaatacttaacaattgaatttgtctcaataataattatgtttaaaattatgaatgctggtttgtaaaaaaaaaagccacaaattttaaaattctgatataatctaatatctggtattcagctttgtattatcattttaaaatttaatgaacatctctggactctaaatatttttctttttaaagttatataaaacattctctttatattcattataactattaaactatttgcctacttatttatattgaaagtccttaatatttttacaataatttaataggtttcacaatcatcattacttattatagtttatactgtttgaataataaatatatgtctatactatgactcattgatacatttcaaaatacagtgcacataagaagatcttcattctctagatctgtcatactacatatgtgaaagttaacatttgtagtggcagtgaatcctaggggcagccttgcatgttaatgttatgtggttgatttgagaggatggggatctgtgtaatcatatgatgacaatttgggtttgggaatctcagaaatgccatcagtataggaatatggctattctgctcttcctaggctaagaataaacttgaagacaaagagtagattttggccagacactgatgctaaagtcaccccgatgctgtctttgcttctaaggtataaattaccttattttaagcaactttttcaccttttcaactctatccctttcctcagcctctttcatatgtgaaataaaatattcacttactactgaggatgattttttttaaacctattaaagaatactccatagctacagaggggaccatatcctttagagactccgttggggatgatcatatgcagaattattcttgtccctttgcctctgcttaatccccttcacaaagtctgtggctcaaacaaatgagagttggcagtactaaaggaataagttcccagcatacgtctgccatgctttagcatcatttcagattagaagcatggagcaaaggcagggagacgggtcaaacaaaatgctgagagcttccctccttttaaaaaacaaaattctagtcagggaattatttttaaataaaatgcaagcccccaagacataaataaacagccagcatataatactaacaactcaatgaaagatacttccccaggtcaactcatctggtaggatcagttattttgtgttactgcattgcccctctagcgggatcatagaagaccctaaaggctacaagaagaactgctttctggctctcaagtcatttcagtggttccctgatggcagctgtctctttggggaggtggtgccgtggtctgtttggggttaggccatcagcacaggccccttgtgctagcatcacattgtcataagctttctgctaccatggctaccatccatcaccaggctctgtctccatgggcagcagcctctgtgcccaggccaccccaggacctcaggcccatctctctttccaaaggtaggtaggtggccttttcccattctttagtttttgactttgtataactgaagcttctcctgggatgatgcaggcagctgctgcacagtcactccagacttactcttcactttgttgttaggcccctgcagctcgctgcacgtgactggtgccatctgccctccccgcacgggcagctgcccctcccacactgcctatttccccctttctgctttttgtagccacatgtctaaagatggcaggccagtctctgtggtctattttatgggactttcatttataactaggcagcaacccacattagttatttatcctgatgatctccctcctcttgccccccatgacaggccccagtgtgtgttgttcccctccctgtgtccatgtgttcttattgttcagctcctacttataagtgagaacgtgtggtatttggttttctgttcctgcattagtttgctgaggataatggcttccagctccatccatgtccctgcaaaggacatgatctcattccttttaatggctgcatagtattccatggtgtatatgtagcacattttctttatccagcctatcattgatgggcatttgggtggattccatgtctttgctatcgtgactagtgctgcagtgaacatacacgtgcatgtatctttgtaataaaatgatttatatcttggggggtagatacccagtaatgggattgctgggtcaaatgatatttctggttttagatatcacaacaccatcttccacaatgattgaactggtttacattcccaccaacattgtaaaagcattcctatttctccccaacttgccagcacctgtcatttcttgactttttaataatctccattctaattggcatgagatagtatctcattgtggttttgatttgcatttctctagtgatcagtgaggttgaacttttttcatatgtttgttagctgcatgaatgtcttcttttttttttcttttattttcttttttttgagacaaagtctcacagtgtcgttcaggctggagtggtgcagtggcaccatcttagctcaccgcaatctccaccttccagcttcaagcaattctcctgcctcagcctccgaagtagctgggattataggcacctgccactatgcccagatacttttttcgtatttttagtagagatggggtttcaccatattagctaggctgatctcaagctcctgacctcaggtgatccacctgcctcagcctcccaaagtgctggggttacaggcatgagctgcctcactcagccatgaatatcttcttttgagaagtgtctgttcatgtcctttgcccacaattgtattgttagtttttttcttgtgaatgtgtttaagttccttgtagattctgggtgttagacctttgtcagatggatagattgaaaaaattttctcccactgtgtaggttacctgttcactctaatgaaaatttcttttgctgtgcagaagctctttagtttaattagatctcatttttaaatttctgcttttgttgcaactgctgttggcaattttgtcatgaaatctttgtgcccatgtcctaaatggtattgcctagattttctagggtttttatagttttggggtttacatgtaagtctttattccatcttgagttaatttttgtgtaaggtgtaaggaaggggtacagtttcaattttctgcatatggctagccagttcttccagcaccatttattaagtagggtatcctttccccattgcttgtttttgtcaggtttgtcaaagatcagatggttgtggatgtgcagtctattttttttttttttttttttggagacagagtctcgctcttctgcccaggctggagtgcagtggcaggatcttggctcactgcaagctccacctcccgggtttacaccattctcctgcctcagcctcccgagtagatgggactacaggcacccaccaccatgcctggagatgtgcagtcttatttctgagttctctattctgttccattggtctatgtgtctgtttttgtactagtaccatgctgttttggttacagtagctttgtaatatagtttgaagttgtatagcatgatgcctccaggtttgctctttttgcttaggatagtcttggctgtatgagctcttttgtagttttatataaattttaaagtagtttcttctaattctatgaagaatgtcaattgtattttaatggaaatagtattgaatctataaattactttgggtgttatggctattttcacagtattgattcttcctatccatgattatggaatgtttttccatttgtttgtgtcctctcttttttccttgaacattggtttgtagttgtccttgaagaggtccttcacttcccttgttagctgtattcctagatattttattatctttatagcaattgtgaataggagttcatattcattatttggctctctgcttgttattgttggtgtatagaatgcttgtgacttttgcacattgattttgtgtcctgagactttgctgaagttgcctatcagcttaagaagcttttgagctgagacaatggagttttccagatatagggtcatgtcatctacagacaaagacaatttgacttcctttcttcctatttgaatatcacttatttctttctctttgcctgattgctctggccataactttgaatactatgttgaataggagtgttgagagatggcttccttgtcttgtgttggttttcaaggggaatgattccagcttttgcctattcagtatgatattggctgtaggtttgttataaatggctcttattattttgaggtatgttccttcaaaacctagtttattgagagtttttaacatgaagggatgttgaattttattgaaggccttttctgcttctattgaaataatcatgtggtttttgtcattggttctgtttatgtgatgaattatgtttattgatttgcatatgttgaacaagccttgcataccaacaattaagccaactttatcatggtggataagctttttgatgtactgctggattcagtttgccagtattttattgaaaatttttgcatcaatgttcatcagggttattggcctgaagttttctttttttgctgttatctcttccgggtttggtatcaggatgatgctgccctcatgaaatgagttagggaggagtccctctttcaattgtttggaatagtttcagaagaaagtgtatcagtttctctttgtacctctgatagaattcagctgtagaccagtctattcctgggcattatttggttggtaggctatttattactgcctcaatttcagagcttgttattggtctactcaagaattcaacttcttactggttcagtcttgggagggtgtatgtatccaggaatttatgcatttcttctagattttctagtttatttgcatagaggtgttaatagtatcctctgatggttgtttgtatttctgtggggtcagtggtgatatccctttatcatttttcattgtgtctatttgattttctctcttttcttctttattagtctagctagtggtctatttttaattttttttttcaaaaaaacagctcctggattcattgactatttttaaaggttttttgtgtctttattgccttcagttctgctctgagcttggttatttcttgtcttctgctagctttgtggtttgtttactcttggttctctagatcctttagttgtggtgttaggatgtcaatttgagatttttctagcttttcaatgtgggcatttagtggtatacatttccctcttaacactgctttagctgtgtcccagatattctgatatgttgtctgtttgttctcactcatttcaaagaacttcttgatttctgccttaatttcattatctacccaggtgtcattcaggagcaggttgttcaatttcgatgtagttgtgtggttttgagtgagtttcttgagttctgatttgattgtgctgtggtctaagagactgtttgttgttatttcagttcttttgcatttgctgaggagtgatttactttcaattatttgatcatttttagagtaagtgacatgtggcaccgagaagaatgtatattctgttgttttggggtggagagttctatcgatatctatcaagtccacttgatccagagctgagttcaagttctgattatctttgttaattttctgtcttgatgatctgcctaatattgacagtggggtgttaaagtatccccacaattattgtgtgggagtctaagtctctttgtatgtctcaacttgctatatgaatcagggtgctcctgtattgggtgcataaatatttaggatagttaacttttcttgttgtccccttcaccattatgtaatgcctgcccttatttgtcttttttgatctttgttggtttaaagtctgttttgtcagaaactaggatttcaacccctgcttttttctgttttccacttgcttggtaaattttcctccatccctttattttgggtctctgtgcagctttacatgtgagatgggtctctttaatacagcacactgatgaatcttgactctttatccagctttccattcttttagttggggcatttagcccatttacatttaagggtaatattgttatgtgtgaatttgatcctgtcattatgatgctagctggttatttgcagacttttttgatgaagttgcttcatagtgtcattagtctgtgtactccactgtgtttttatagtggctggtaacaggttttcacttccatatttagtgcttccttcaggaactcttgcaaggcaggcctggtggtgacaaactccctcagcatttgcttatctgaaaaggattttatttctcctttacttatgaagcttagtttgaccagatatgacattgtaggttggaaattcttttcttcaagaatgttgactattgccccaatctcttctggctttttgggtttctgctgagaggtctgctgttagtctgatgggcttttcttcataagtgacctggcctttttctctggctacctttgacgtatttttcttcattttgacattgaagaatctaatgactatgtgtcttggggttgttcttctcatggagtatcttactggggttctctggatttcctgagtttaaatgttgccctttcttgctaggttggggaagttctcctgggtgataccctaaagtatattttccaacttgattctgttcttcctgtttctttcaggtaccccagtcagcggtaggttcagtcttttaacataatcccatagttcacagaggttttgttcattccttttcattcttttttctctaatcttggctgcctgctttatttcggcaagatagtcttcaagctctgatatcctttttttccacttggtctattcagttattgatactcgtggttgcattgtgaagttctcatgttatgttttttcagctccatcaggtcatttctgtcctctctgagctggtgattttggttaacagctcctgtaatattttatcatggttcttagcttctttgcaatggattaggacatacttctttagctcagtgaagtttgttattacccatcttctgaagcctacttctgtcaattcatccatctcagcctcagctcagttcagggcccttactggagatatgttatgatcatttgaaggagaagaggcactctggctttttgagttttcaatgtttttgcattgattctttctcatctgcatgggtttatttacctttgatctttgaggctgctgacctttggatgaggtttttatgggttctttttaattgatattgttgtcctggctttctgtttgtttttcttttagcagtcaggaccttcttacatagggctgcagccatttgctgggggtccacttcagaccctattcacctggggtcctcccacacctggaggaatcaccagtggaggctgcacaacagcaaagatggcagagtgctccttttccccaagaggagcaccaacctgatgctggccagagtgctcctgtatgaggtgtatggagacccctgttgggaagtctcaccgactcaggaggaacaggatcagggacccgcttaaataaacagcctggcttcctcttggcggagagggtgtcctgcactcaggagaatccgcctcatcagggctgccctgactctccagagctggcaggcagaaaagagtaagattgttgattcacgataccgcagccgcccctcctcctatgggctcctttcagggagatcagagttctgttcataaacccctggctagggatgctgaaaatcccacagggaggccccacgcaggtaggaggaatgggtcaaggttctgcttaaagaagcagtctggccaggaactgtccacagctgctgtgctgcgctgtggggaattgctcccgttccaaactgcccagtctcgctggcacctgcagcagggaaaaacggctgactggagcagcagtggtggtagccaccccttcccccaccgaactcggtcttcttaggctgtctccaacctgctacactggctgacagggattccaaagtgggtttcagtttgtagggttccaagggagcagggccgctgagcaaggccgcttggctccctagcttcagcccccttcccacaggagtggacggatctcctgcctccttagttttcccagagctagagtatgcaaaaactcttatgtctcagtgtctgcccaagtggtcgcccacctgagcagccgctgtgagcctgcacagctctgtgttttggacccaaggcccttggtggtgtgggctcacaagggcgtgggttgcagagatccatgggaaaagcgtgcttttcagagctgggtagcacaatacctcaccagcttcctcggctcagagagggagcaccttttgccgcacgcaggctccgggtgggccctcgctccaccctgcttttcctcactgtctgtgggttgcgccaaccatctagtcagtcccaattagagaacctgggtacctcaattgaagatgcagaatttacttgctctttttgttcttggtggaagctgcagactggagctgtttctatttggccatcttggctcaaggttcagtttgagtttctgttgcagacactgcaagaaacagaaccgaatgaacaagagatatgaaagtatgtatcatggcaataactgtttctgtttatttcttattttgttttattttgctttctaatagaattggaggaaataggaagtatttaaaaagtgtttaaatttaccatcaattattcctgtatagttctctatttttaaaaatatgcccccaagttttgaaattctgattcaatacggactttgaaaggatgtgaaatttgggagcacgtattgctgttactaagactgggggctgtgagagggcttggtgttcccccaagcagtcaggcttgcagagagaatttgtgtcctgctacggtcttttgtaaaggaagctagccccacctgttgttcaaattcattttgcttgcgtgaaagaggaatgctgtccctggaaacctctgtccaagtgcctgttttttctgttgtgggcagcattgcaaaagtgatctgtatcctctcagaaaaaggaaaaaaaaatcacatctaaaaatgttcaatgtcattacattgaacactgaccggacaagtaagctggaactgtatggttatattcacaaattctgggatgtttgttttggctttgtgttataattgcagctacgaaactaaaagtgaacaaattgctttctcatttaatttctttttatcatgtctaagtctcagtatttttatttgtagaattgtgttaataataatccacaggcttactatgaggaataaatcagatactgtacataaaacaaataggatatttgttgacatatagtattcattcaccagatgcttaatctttccttcctcttgtctatgttagcctgcgattgttattctagtgttggtctcaaataacttaaactgtcattagaattttgctttaattcatagggccaatagaggaggaggcaatggaaaaatcactaggtatgtttgcttagtctctcagatgctatagcacacaactctcagagacttggaaaaatggaaacacagagatgttgttttgtgttttgtttttgagcacagttcttatagtaaatgtgaatgtttactattatttctagggtttatgataaaagatggaaaagagaggctatactgatgaacgttgtcaacatgggggcttgtcagaaattaaacaaacttttaagaaagtaattgaatttaacaaacattattgagtaccttatctggcccaggcatggatcttaacctcaactcctcatcaagggtagaaagtagactcagtcaatgctaggcatggtggttcatgcctgttattccagtgcttttggaagccaaggcaggacgatcgcttgagaccaggagttcgagaccagcctgggccataaaccaagaccttatcgctacaaaatagaaaaaaaaaaaattagccggaaatggtggtgtgtgaatgtagtccaagctacttggggctgaggtgggaggattgcttgaaccgaagagtttgagcctgcagtgagccattatcacaccactgcactccagcctaggtgacagagccagatcctgtctcaaaaccagaaaacaacaaaacaaacagacaaaaaacagactctttctagtcatgactttattccagtgcttaccacctggtccttgccctcagagttcacaataaagggattctggtctgggaagaaagcaactttaaagaatttctatcatcattctcataataccaataaactccaaaaaagagcctaaagattttcaaatgaccttccttagaagttctagatcctagttgattacctgagcaaccatttgcctatgtgtatttcaatttaaattgtcataaacagctactcaaggaattgattaatctgaattcaaaaataacttttatttagtgaaagtcaaagcacattattgtgttttaaaaagtcaaatgttgccaactcatgacttagttaagcctggaatatgaatgtgcaattgaagcagacattggctgtatgcacaatgcctgctgtttttcttgctgttagtcattatatgttatgtcctttgtcaggttggaaacaaaagattaatttcatttggtaggcttttaaaaatgtgtttgtctggttgtgtgtgtgtgtgtatatgtatatatgcatatatacacatatatacacgtatgtatgtatatatatgtatgtatatatgtatatatgtatatacacacacacatatataaatttagttctgaaatttaggcatatatatatatatatatatatatatgaaatttaggcgcatatatatatatatatatgcgcctaaatttcagcactaaatattaaagtttaggcttaaagtaccaagatatttttttcagagatggattattttagcactaaaattcttctgagccttcagtattgctgagctttatttaggaaatactcagtgatagaagatgaatgcaaaaaaaattgattaaaaaccggagccttaaaaattgaattcccttcttactgttgatgttcttatattattttggtatctacataaatgattatttgaaaaaatttctgacatctgatgatgtgtaacatgccaaattaatttccgaatgttaaaaatcattttacttatggataacttcattatgtagaagctgactatctaatttgtaattatttttatagaaaaatggcaagtagaagcttatcatgggtgaagttaacaacaaaaggctaaaatttatttgtctctcttcagtctttttctcttcagtcaaagacaacttacacacaacaagatttctccttcttaattactacatttattatggtatttaccctgttcaaaaagccttagtgaggttccagctttgaataagatagagtaaacatactgtgccctgtctgtcctactgaatacaactatcaaacctggacaaaacacatgaattatattttcaaggactctgaaaagtgaattgtagcagacggactgagaaagaccagacctgaaaataaaacaaaaccaggcgtgagtttaccatgtttatcctctggaggaacccagctttgacttgggaagctcagaagtagacatcaacacaggcaggaagagcttcacctggcagtgacggtgacagcagctgagggtccccaggtttctaaagctctcaggacgagaaagtaggtcccaagataaggagcctaaagggcttttttctttctgtgtattccttcttggcctccaacatgggtacagtcacaagagcatgtaacagagaagaaggaatagacctaccattttctagataaagaattggaaagaggatccacaggtaaccaaaaagtaccagggaaatggcagagaaggaaaacctcaggagaccaacctcataagtggtatttattagtgcctgggctcaaatccaaattgtacatgaatatgtctggtcctagatagggtaccgaagactttgaaagtgaattttggtatatcattgcccagattccagactggctattgtgtgacacaacatacaggatatatctgaatagtgctcagaagagtttgaaaatgcaaatgatattaaaataaagatgaaaaagagaaagctggtcagaacttgtggacataacccttctggatctgttgcctgattaaaaaatagttgatattctcgaatgaattaaaacaagatttagagactgagcatggtagctcattcttgtaatccaagcactttgggagggcaaggcaagagaattgcttgcggccaggagtttgagaccagcttggccaacagtgagaccaggttgctaggaaaaagaaaaaataaaaaaataaaaagctgggcatagtggcatgtgcctgtagtcacagctacttgggaggcttaggcaggaggattacttgagctgaggatgtcgaggctgcagtgagcacatcactgcactccagcttgggtgatagagcaagacctaaaaattaaaaaaaacaaaaaacaagacttagagtctcataatattcagtaagtctagcatataatgaaaaattgctcagcatatgaagaactaggaaaatttcaacttgcatgggaaatccaacctacattaacactgagatgacagatcttggaattacctgactgactctaaagcagctgttattaaaatgttccaatgagtaagggcaaatctctttatatgaattgaaaggaagaaggtctcaacaaagaaataaaagaaatacagacattttatggtaactttagaactaaaaaacacaataactcaattaaaaaaaaactcattggaaggctccatgaaagtgacagaggaagaattggtgaatttgaagatagattgatagaaattatttcatatgaacaacacagagaaacatgatttcaaaaaaaatgaacatagcttcaggaagctgaaggacaacataaaaaggtctgatatgtatggctttgaaaatccagaaaggtagaaagagtgcagtgtgtgtgtgtgtgtgtgtgtgtgtgtatgaacatgtacacaaacgtatataaacacccttatgtttgaagaaataatggctgaaacatcccaaattagccaaatcacataaacctacagattcaaggacctcagaaaactcaaaataaacacaaataaatccatgcccaaagacatcataatgaaactgctgaaaactaaagacaaagagaaaccttgaaaaaagcctgaaaaaaaatgatatgttccttgtggagaaaaatctatttaaataacttcaaatttcttgtcaaatttcacagaagctaaaaagaaatcaaccaacattttttaaatgctggaggaaaagaactgtcaagtaaaaatattatatccaacaaaaacctcctcaggaattaaggcaaaataaagacattctcagattaaaaacaaaataagacaaaacaaaacaaaacaaaaacccaaagataccctctaaaaagtttgctgaagaaattcttcacacacaagaaaataaactgaagagcaagtttcatgaaagaacagcagaaatggtaactatataaataaatatagtacatatcatccttttcttgagttatttaaaacacttgagagtcaaaagcaaaaatatgacattggctgatacagtttttatccagtatgcatatttaatttaaatatctactataatataaaaggacctatatgatggtagtaggattcctgcattctacttgaaaaagtaaagtattgattctaaatataacatgaaaattaagcatgtatatagcaatccctggagcaaccaccaaaatttttttttgtatacacaaagagatacagtaaaaaacctgatatacttcggtggaatgctaaaaataatccaataacacaaaataagacagaaaagctaaaacagaggaataaaaatcagaaacaaccagcagaaaacaaataatgaaatggtagacttaaatccaagcatatctatacttgcattaaatgtaaatggtctaaagggccaatttaaaggctaatgattaccagaataaataaagaaaaatgtatgatgcagcaatatgctatgtacaaaaaatcactttaaaataatgacaaaggtatgcccaaagtaaaaaggtgggaactataaaccatgcaaacattaaataaaacaatactcaggttgctatatcaatattagacaaaatagacttcaaagcaaggaaaatgactgggaataaagatgacattaaataataataaaaagaacaatttactaagaagacataacaaccttaactatgtctgtagcaaacagcatagcatcaaaatacgtgaagtagaaactaacaaaaatgaaaggacaaacagaaatattcacaattatactttgaagattcaacagtactttctagaaaattgacagaactagtaaacagaaaatatgccttgatatagaaaagctgaaggaaaaaaccaactgactgaatatagttgatgtttttctcactctactccaaaacaatagaataggcattcttttcaagtgcacgtggaataatattacatttatgaagatagacctcattctaaataataaaacaaatttatggcaagttcatggaattgaagtcacacaaaatatgttttttgtccatagtgtaattaaattagaaataaatgacagatgccaggggaaaaaaattccgaacagtttgaaattcaacaatacacttctaaatactctacagtcaaagaagaagtgtcaaaaaaaaataaattatttcaaactgcatagaaatgaaagtacagcatatcaaatttgtggaatgtctgcaaagcaatgtttggaataaaatttattatgtaaaatgctcatgttatgagaaaataagttctcaaatcaataatataagcagccaccttaagaacttacataaagaaaagcaaaaaaaaaaaaaaaaaacacacacacacaaagcaatcagaagtaaaaataataaagagcatacatcaataaaactgaaatcagaaaaacagtagaacaaattaatgaaaccaacaggtggttcttgaaagagattaatcaaattgatgaacctcttgcaagactgacaggaacaaagataaaacacacaatatcagaaatggaagaatcaccactactgacaccatagcattaaaagcataagaaggttatgtgtttatttatgtataatagcaataaataattagcaagcacaacttaattagtaatttcacttaaaatagctttcagaatgtgaagcacttagacataaacctaacaaaacatgtacaagatatgtatgctaaaaactacaaaccctcatgaaaaaatcatagatgacctaaatgaatggagacatgtaccttgttcatggattaaaacactaaacttgttaagcatgttaattctactgagttgatctatagatttaatgcaactccagtcaaaatcacagtagaatattttgtagatatagacaagctagtgctaaaattcatatgaaaaggcaaaggaactagaacagccaaagcacttcttgaaagaaatggagaaattatgtgctcaattttaagaattattaaaaagcttcagtaatcaagagtctggtatcagagacgagatcagtgggtcccatagatcaatgggacataaatagacctgcataaatatgccaactcatctttaataaagatgcaaaagcaacttactgcagaaagggtaatgttctaacaaatagtaatggaacaataggaaacaattggtatacagaagaaaatgcaacctaatcctcacatattatgcaaaaagaagctcaaaatggatcgtagatttaaatgtaaaacacaaaattataaaatgtttagaagaaaatcttcatgacctagagttagggagtgagtttgggcatatctaagaagaaaatatatgtatatatttgataatttaaattggactttatacaaatttaaaacttttgctctgtaaaagacactataagagagtgaaaagataagctatagacagaaataaaatcttttcaaatttcatattcttcaaggggtttgcattcaagatatatttgaaaactcttaaaaatcaatggcaaaaatacaaagaacacgatttaaaagtgggcaaaagtcttgaacagattgtcgaccaaagtagatatggggaaggtaatcaaacagaactatgtgcaacatcattagcttaacttagggaaatgcaactaaaatgataatgccatagcactagaatgataattataaaaagaaaacaaaacgaaagaccctttcactaccaactgctggtaaggatgtggagcaactagacttcttatacgttgattatagggatacaaaatggcaaagctgcttgaaaaatgggttggcaatttctcagaaaggtgaacaaatgcttatcatatgacccatacatgccattccttagtatttatgctagcaaactttaaatttatgttcacaaaaaaccatatgtgaatatttatagtagctttgttcatatttgtcaaaaattgacaatcatcaaaatgccattcaacaggtgaatagaaaaacaaactgtggtatctgactacttcttgtcaattaaaaggaatgaattattgatttgtgcaacaacttggatgaatttcaaaggcattatacagaatgaaagaagtcaacctcaaaaagtttacctaccatatcatatagaatttcaacaaggcagagttatggtggaacgaaatcagtgagtgccaggggttggggtgggggaaaagtgtgactacaaggagatagcatgggaggttttgggggaactgatggagctgttccacatcttgattctcatggtgattatataaatctatgcatgtgatataattcataaaactatgatttatatgactataaattaattttaaaaataaaactagaagaaaaaagtcttcccaatgcttgactattgcttttagattatcctctaaactccatagcaggcaatgaatggcttccattctctggctacactcattttcccaacgtatttttttgcccagcattgttgtgaatctgttctcagtgtctcactcactttagtttttctctattccctaaagatccgagttataatatacaacctcaccaatgctgattatttgagaccagcagcatatctggagctggttaactgacagatgtgattggttggaactttacctaattcacccaaggcacatttggttttcaaagacttgaaaagggatcaatgttctcatctgtgaggttttaagacttttgtaggcgaggatgaatttcattctactgacaacctgaacgttttttcatgatttcaatacccctataaaaagataaaggcagctgggaatacttactctagaagaaatatggttgaaaggagaatataaaccattcacataaatggtaaataagtatttgtcatcttaactaaggatacaaaaaaaaggaagtgtgcatcaattataccatgatggattaattgtgctgtatggaaaaatttcctattaaggaaatttgtttaccttcctgaaaagtgtggctgaggttggtcacagagttgttctctagatctctttaaggatagattcctttttattttttaattgacaaaataaattttatttacttactgtgtacaacattgatgttttcaaatatatatacattatgaaatgactaaattttatcaaattaacatatgtattacattagatagttaccatttttgtggtgagaacactttacatttactcttttttttttaagaatacaatgtatcattaatgatagtcaccatggtacaataaatatctgtaatttattcctcctatctaactgaaattatgtatcctttaaccgacatcttcctaacacctccaatcagttcaatccaccattctgttctctcctatgagatcagcttttttagattctgagtatgagtgagatcatgcaatatttgtctttctgtgcctggattatttcacttaatacaatgtcctccaggctcatccatcttaattgcaaatgagaggatttccttctttattacagttgaatagtattttattttgtatatgtaacacatttcctttatccattcatccactgatggacactgaggttaatgtcatatcttgactattgtgaatggtgctgcagtaaacacggtaaacacggaagtgtaaaatatctctttgaaatacttatttcatatatatgtatgtatatatatgtatacatacatgtacatatatattcatacatatatgtatgtatatacatatgtacatgtatgtatgtatgaatatacatatatgcatgtatacatatatatgtatgaatatatatacatgtacatgaatatgaatatatgtacatgcatatgtacacatatatacatacatatatatatatatatatatatatatatatatatatatagtggtgggattgctggatcatatggtagttctgtttttaattttctgagaaaccttcacgctgttttccataatggttacactaatttccattcccaccagcaatgcacaagagtcccctttcctccacatcctcactagcacttgttatgttttgtctttttggtaaaagccattctaataggtgtgaggtgatatcgcattgtgacgttaatttgcgtttatccagtgattagtgatgttgagcatttttcatatgcccgatggccacttgtatgtctttttttgagaagtgtctattcagatattttgcccgttttttaatcgggttgttttgttgctgttgagttgtttgagttccttatatattttggatatgaaccccttatcaaatgtatattttacaaatatgttttcccataggatagatttttaaccgtttgggatggtttaagggaggccaaatggaaagcctaaaaaaagagcattctgtggctccatggtggattctggcatacttttttcaggatgctcttttccaggtcaatatttaaagaacttgaagaccgcaaagcttctgctcttgagatgagaaggagcttctcctccactaatgatctgaatttaacactggatcacttaaagccaggttcatttgcaaaatatttgctcagctttgatgctataaaagcctctccaaagctaaggaaaccctgagaaatggattattcatgtgactctgcagagcttggtatcaggcattgcttgtatttaatctttccctaagcattaacattctaagcttatgaaaaatttgtgacgtatgctaaatatattccatccagttatgatcagagtccagtcacctgagtgtaagatttctgccctttcagtgagaattgagagccctggtgaaggcagatagaaaagcccagaaacacttgttgttttatttatttttcattgagcctctggctaatttttgataaggtgtcacagatttaatcagttttagtttaaatagaagattgagaaatactatcttcttttcattaccattagaaagaaaccttaaagcttaattttgactgcatgaaatgatatctaacagcaaatatttgtaattggtgtattccagatacttgtagtgtaggaaatacaatattgttttctttaaaaggaaattgggtgtgtataaaacatcagaggaaacaaatttaaggcaagattctgaatgacagttctgtattctacaaacctttgctaatgaaagggaagatgatgattttcaatgtaggtcatggcctgaagtggagaatttctgaaattgtcattgcagaccctccaatcagcctgatctgtctctgcaacactcctgatgagctctgagccttctcagtgctatgagtatttacatcaggcagaggtgggttgggatccaaagcttacccaccctaatatgagtaagatgattctattacattcatcctagagagaatatccttcatagaaatagaggaagaaaaagcttgcatttggttaggaatatagattatgaagagcctccttatcytgaaagctgagataatatctgtatcatatgtggtaacaaaaaataaggttatttgtataaagaagttagcatataggaaggtatatagtaaagtgcttcataatggcaggaaggaaagaaatattgaaggaaaaatttaaaagacattgcgtcagttggtatctgtttttggcaagtaaacaaacaaaatatattttctcttttctgccagtagataggttaggaagcagctggaaggtaacatcgtgtctgacttctaggatatcacaccttcaatgagttattgttttattgttccttgggagcttccactgaacgtggtgttctgtcacttctgaaactctggggatttcttttcatgatagaaaattgacaactagtatttttttaatcatagaaggtaagaattgtgcttattgaccaaacatgtgatcaaaagtggttagaaagtctttagcaggtgtaccataaatgcctgccaccttcccatttccacacctccacagacagcttcttgtgaataccccctccacacatacccaaccatacatagtgttctctctgctaagaagaaaactgtatacagaccacatgacctcacctcactttcattctcctccgtacccaaagctgagactatggtggccagtcatttgtaagctgtctaggcacctttgacatggcattgtttgaaaagataagaggttatctttggggaatttggtatgaaggaacaaagcaatgagcagtgaagatgaaagtttatgtgacagaggctgagatagccatcatggggaatgatttaagctgaaattgtgggaaagtagaaagtatgactatgaataagtgtaatgtataacataaagacagatgatttataacacagagaaaatattacagatcagaaaatgaaaaagccaaaggggagagataagagagtggaatcgatttctgcgtaggtagagagtttaatataaagtagaatatggaatccttccatgttctccctcataaaattcacagaaacctcacgacttaccaaagatgccaagaggagcaggagatgctcttgtgtttcacccaaatatttgtttctcattttttttaatgaatgtgtgtattttctagaatgaatataaaggaatgcctcattcgtttatgtatttaaaatacgtcttgactaccaataatgtataacaacctctgctagactcaatgctaggtccagtgcatgcacttggaatccagggacccaacttggaagggctcacagtcttatgttaggagacagataaggaagcatatttatggggcacatgtgagattttgttacatgcatagaatgtgtagtgattaagtcagggtatttgagatgtccactactttgactatctgtcatttctatgtgttacatgctgtgatactgataaagacagggtatgtaaatgtgggagctcaaaggagggacatctaactccaacagtttgccagttgtggggaagaaagggtaaggaagtttcctcaaataattacatctgagcagaattatggcatgccagcaacctcagccaggtgaagggcaaagagaaacatttgcatgagagcctccagggaggtagagaatgcagtgttcaggaactacaacaacaacaacaacaacaaatcaagtattcctgggccacaagatgtgagagggggaatgatgggagatttgctggagggcagggggattcaaataaaagaccagcacacatgagctggtttgtgacctactacatagttttgacttgatccttacaacatagtattttaagttaaagagagagaagttcatatttgcagcggggaggtggataagtggttgttgagacattaaaatagtagagtttactggacttggaagacttagcactggacttggtaacttagtaccttgatttctggcatctcagtgagttgaggccacatgacaagtaggaggaagagcagttattatcaagagaatgcaaatgactgaaatgttgagttggggtttctatgggatatactggtagatagcagagtcagtagtaagatacaaataggtctgagacacaggagagaatctcaaaagggatattaagcttccatctctgtaagagccatatggttgggtagttggtttgctttgtgctatacaactatttgaagttctttacattttctttcctcctgttttttttttttttttttttttgaaacaagatcttgctctgttacccaggctggagtccagtggtgtgatcatagctcactgcagcctcaaactcctaggctcaagcgatcctcccacctcagccaactgagtagctgggactacaggcatgtgccaccatgccccattaattttttatttgtattttttttaaagacaggggtctcacggtgctggccagactggtctcaaactcctggcctcaagttatcctcccacctctacgttttcaaatctaaaaaaatagtttaggacgtattcaccttagagatttaagagtttatattttagcaagctgtaaagtccagaaatcaaattgtgagtgggcaaacaaaatcaaagcaagtttcatctcatttagaaatgtggaagaatgagaacccttagtttaccttgcttttgtgcatgcagagtgctagctgtaatgggttagcacaaaaagacaaaatcctaaatcacagtcactttgccataatttttaatagttatgttctctcatagttctatggatgacatgctcattatagacagtctgaaactgaggagaaccagggttcttcctacatgtttatgttgaatgtggagaaggtgaggttactgcttctgctgcccttttcagctcaacatttgatctggccaatgtggttagctatactgtgtctcctaccaccacacatactcagaaaactgtggtagtaaacatagaatgaacttccttaaaagtagaaaaccattcattggctaaggtacataagaataagaatgaatgatgaaaacattggtagaaatgctgatggaagaactgattgatgcagatctattttggagaccccttaactgccaggggacatgaattgcctggctggttgaattgactctagaaatgatgctctgtggccgctaagtctccatatttgaccaaaaggtgtgtgagggctgtgtccatttcatcacttgccatgagtcctcagggctagtcagaataccaggccgatacacgcttcacaagcatgtattgaatgagtgaatgagaaaatgaatacaataatattttcactagtagccatggattgaggataaaattaataagaagagcccccaggaagtccggattgagctttatgctctgggacactcttctgctcagctttgtggaataatttgcagcactagaaatggacttaacaaccaggatgagggggtcatgttttggggatcaaacctcttttcatcatgaaagctactgggtggcctctgacatgatgtgtttagttatcaaacatgtcagctaataccatggagagaacacatgtattaaaagtgacagacataacaagggtcaaagattaaaggtgaattgcaaagggctttttactgcatctctgttgttataacagtttctagagtaggttgaatacatgagcaaaaagaatgatgaggagtcatggtgagcagaagctctcttctcaggcaaagcaggaatttttttccccacattgagctaaatattctttaaatgctataaatgttactacatatctgtgctgtttgtgggacagcacaaacatatttgaaacattcagcagttctttctcattaacttccatttttctaattttcattggttatattttcctgattacagaagtagtattggctcattatcaaaaataaatgaatgaaaaaatatagacagttaaaatgtgatataatgtaatggcctaaatatgacattgttaactgtacattcctgcagttacaattgaagatggcattttatcccttaatcagatacaaagaactgttagaaaacttcctttttgcccaccactgcattgtatactgtggtatatatggaaattcccaatacagacatggaaatgataaataaacacaaggggaactctcacggcataactctgtgtctagcaggctaagataataccatgttgtgcagtggtggtaattagagcacatcacgtgactctgagtttttgagggcagtggtcaatatctttatctttgtatccccaagggtgttggctaaaatgttcagttagcactttgaatgagggaatgcttattgagtaaaaagtcaattacatgtgacaataaatgcagtaagaattagtcaagagaaagacaagtgtggcctgcagtcaccaacagaagctttaagctccaaggatacccaaatgcgtatgttaatcatgtgttattgttaaagcatttagatgatgatgtttggaagttgtgtgcaaaaccaggaaaaatttgaccaagttttggaagttcctttctgtttgatttatctgctgttatggtgttagggctattgctgttttatagatcagttctacactgtagtaattaactgggtaatgaagacaaaaagtatttagaaacactctgacatatcaagaaattagtgtcaccaacccagaggcttctctgtctcttcagcataatcttccatctcaggtatacctaaacttgggtgtttactgcctcaaaagcaagcatttcccttgaaaagcagatttcttcctttctttttttttttttttttttttttttttttttttttttttttttgagatgagtctcgctctgtcacccaggctggagtgcagtggcacaatcttggctcactgcaacctctgcctcccgggttcaagcaattctcctgcctcaacctcccgagttgctgggtctacaggcatatgccaccatgcctggctaatttttttgtatttttagtagagacggggtttcagtatattggccaggctggtctcaaactcctgacctcaggtgatccgcctgccttggcctcccaaagtgctgggattacagagagaagctccagcttttgcactagctgaatgttgttatacttcctcaaacatttgaggataaagacataatatgtgatagttttaggtgactttttgtgtgtaacatttgagctctgaggataataatatatctttctatataacacatttcaatatctatttaatgtgccagttgcaagaattttctgattgacattgatcattttcattcagaattaagtcatttccttctgggaattaatataatagatttattatatgcttatgggccttgtctaagctctcttctccacactgtttcttcaaatgtaattccattgaaaatctagctgctgttttagagattacagtaaggcaaagcatttctcagaagacaaatatagaacctaaagttactataatgacatttggcaaattatataatctgagttcattttttttctcttctctccctcctcccttgtcacaaagcctataggaaggtatactacatattttgacacttttttttttttttgctttcaatagctgtgttcttactcaccactttaaaataacgtctttcttatatcttttaactcagaggtatactcagagactggaagacttgaacggggactggctacccagatagagcccccttggtggtgttttccttggtgatatgatactgggccgtattccctcaggattgcagggtgagaactgtgtctttgctagcagactaggtaggagaggatccattcctcagaatcaggttcatgttaacatagttcacatattgtattaaatacaaaccagaatgccaagttttttatttacaatgagcaatatagctgttaaataggctatggcactcaagtcaacaacaattcacagactcctctccccatagagaagcaacatggggatccaaattgtaatcagaatgccaagttatcaatttataatgagaaatgcatctgtctgacgagaatgttgagttggcctgataaattcattgtctccctgtagattagtgacaggggatgccaaattttcggaaagttgcgagagaatatggctttaaaacaatgggaaggagttgatcttaatttctgtcttccaattaagatggttttaacattcccacctctacctggctggccttgccgagaaaacaatactgctttagtcaaacaatactgctttagtcgctgtgaccagtgtgggcaataaaatgtttattttctgcctttcctttttctttgcttttctcaaccaactacctctctccaaaaatgtgtatgacataattgattgggcttttgtctgtcatagtattgattcatcgagcctcaatcatatttcagccttccagccctagaattactcccatattattttttactggtgtctgggctatgttcatatgtgccaatcaaacatgtatagtttactgacctaacctcacatttgtttaatcatatcctttatttttaaattctgtaaatcaactcactgcagtccttggcactgaaaatacctctatttcttcactacatttcctgaagtggcaaaaatgccaagattatatgagacccagggggaaatatagtgttctctgcccctagtgtttaatgcaaattgaaactaaaataaggcttgctttgaaaaagtacaaaaataaattttaaaaaatgctaaaagctggattcttctcttttggagatggcaaagagatagtaaagttgataaagagatgatttgggaaatgcaggtactttttagcattagtgagtagactcatttctaacatctcctggaagtatttgtgaattggctccagaatcttttgctatcacctaccctacaattaactagggatatgcaatcaccaaatacagtttctgggacaccttcaaagatgtcagcttcttcaccataaagatggcaaaaagtagaataattacattctatctttgacctttgatgagaaatgatcagtttctttttctaatccaatatggcaagcacttctaattcgtgtgaatagatctctttatagacatagtgtgtttatatttaaatactaagataatctggaattctgaagctacaactgtataatgacattatacttggtcagctattgcttttcttttcccatttatttattttgcattgagtcctacactggtgaaaggcctggtgcgttgcattgagttctgcatgtttgaacttcacaaaggttcaaaggtgtgcacatggcctggaacgataaacatttgtcctaaagtcattcttcagcttctgacatagcttgtgatttaattgccacctcattaatatgggccactgggtgtgaatttgtcaaaacaagatacatcaggagagctgagtgaaatgtttcatgttcagaggtttttaccactcctgttccccactgcccatgttttgtaaacttttaacttcaagagactggtttaataaacatgccctgtcttctaggtcattgggttaaggatcatttcagtctttttgaacttttcacttttcctgtgtaagtataagctaagtacttattgggttctaaagctaaaagcctatgaagataaagggccttattgaaatagtgaagtgagcaaaatatctttatggttcctgaccttgtcctcctgggctttgtccttcttttaatgaatgacaccttaccctcaggttcccagtatttacacctttgtagtgtttttgcaattcagaaaaatgtatttgatagatgagtagggtgactgtcgtttacaataatctattttctatctcaaaatagctaaaagagaatagtttgaatgtttctagcattaacaaaagacaaacatttaaggtgatacatattccaattataccgacttgatctttacaagttatacaaatgtattaattcaccacgtgtagcccaaaaatatgtacaactattaagtatcaatttaaatttttttaaaaggacacagtgaaggaccatacttaaacttgattatttaattgctcatcatgaaattttatagggaaagaagaagaaaatcttcaataactcaaactcataagtaaagggacatacatggctgtatataaaggctatttataaagccctctatataaaagttatacatagcctataaaataaataaggatctgactttatattggtacctggcacaacacatgcattgcacacaggaaccactccataattacaattaaaattattatacacacaaatacatatttacttcttatcaaggtatcacatgttaatgctcacatgaagcagtatcaaaataccgccaatgagttgtagaagtctcttgctctattttcctcagtggcattctcactccctagtgaagtgtttttaattatttttatttttttatttttttactggctattttagactttctggtagagcactcaataatttctggatctgtcagagttaggcaatccactctgcaattggcaagatggggattttgctcatttatacttgactctccttcttctattaatcttctccttctatttatataactgtaacatagctgcaagctttaagtaaaacacgtaaagtcattttcttgttctgatgacttgcaatattttctctttattccccacgagatgaaatgaggatcttggtcccatacgctttccccaacttcttctcactcatttcaggccctacttctgtcaatcactctttctgtgtttagattgttgatatttgcacgttctgctaaaaatacaatcatctttgcccaaaggttaactttaaaagtagaacaataaacagtattaacattattatggccacataaaaatcatttaatgttaggtaaaaagtatgttaggattacatttttttaagagaccaatgtcatgacctctaactcactgaaaagaaaagattcctagcatttgagttcaaataaatgtttttttccttatatttagtcaattgcttaaaattaagctgcatttcttttatgtattctattttcctgcatcatatcttcatatatatttttttactctctatcatattatctagtctatttggtctgctttcccccactccaaatatatcccccttctagagtcgtctttctccctactccacactggacttacaactcctagacatcgtgctgcatcgctaatgtcctaagtttggtgttattggtgctatcaatcttcttggttagatctgatattttggtagcttcctattttttgaattatcctcttgttttattataatacatcctaaagtaacttcctaagagaaagcacacaggaggtaaatgttctgtttcttgcatactctcatatttgtgtgaccctttggccgacgatagaattctaggttgaaaagagttttcctttcgaaatttgaaagctctgctccattgttgttgatgagaagtcaagtactagttttattcctcctgtttccctttaaaaacttttaggagcatctcattattttaggtatttacatgttttcgatgacatacttgagaatcctttttgcacttattacaatatacactcaaggaaacttcttggtttatagattaatgtcttccattgagctatgggaaactttatttctatcttttctttaatatgttctcgcctccattttctctcttctctttctctgacttttaatatctggatgttagatcttccagacttatcctttctcatgacttctgtctttatactttagtcaaattagtgagagtccctttactgtgtttactccctctacttttctattttgtttattccaacaactgtgtttttagtttctaagtagtctttcttgctctctattttaattgtccttaccttctgtttttattttttggttataatagtttctccaatttgtgtaagtttattagagtatcttttgtctttgttcatttatttcttacactattcctgttttcatcttgcctgtcttagtctttatccataatattgccagatctcctaatatatttattattcttgctggtctatttgtatttaagggaaacaaaaatggcagactgcttttttttttatctaatagaactatttacacttaaaatctttatccttagtgagaactgtgggaatagaggaaacagagggaggggcaggtgatccaatatattaaagaggtgaaatttggcatcaatgagcctccaccataaaagaatgtgaaaattgctattcccagatgccaacatctaactaaagccttgcttttctactgggaattagttcaatttttttagagaagaacaaacaataatttttgttttgctttgttttggtttttggtttggggggttgcatgattattattttcttggatgattattattatttgcttgtaattgttcctgctgtttgtttcccaatatctcaaacggagatatttggctgcacaggagaacaacatatgtagctgtttcatacatggagcttacattgggttttgttttcagtcatatcttttatttctacccttggactccctgaagtttttgttattctttttatttctgccaaatctcccaccaatttcgtagtcaccttatagcatattttagactctggttttctgcctgttacgttttaaaatggagcagtaaacacaattatgaccacataactaagttaaaattgagtcaaaaagtgtgctaagattaggttttagatttttttttactttcagggaccaatgttgtgaacttcccatcacctatcttcatcttcatcccaaaatagcacaccctttcttggttattatgtacttcttttgtgttctgctaaactattatatactatacttatgctttcaaaataattcatttatatataattaagttttgtgtaaatatttaacatataaatatttagtagaatctctgaaaggagtgaaggcaaaaactttcctgacccataataattacatacctagagcatcacaaaatctattatcaatgaatggattctgaattctttgataacatgtctttaatttttaggatttaaagtacctcctttaaagcaccagaccagtagtcaattattatgatactcacctctgatattgtcttatccctgagtgtgtaataaacttctggtccctggaatttctcttccctcataaaactgtttctcaatgtatcattttgtgatgacttttttttctgagcttcctttacctacccaataggtacacattttttcccaagatgctacaacaataccagacaattccagatattcccgccttccacttgtgatctgtaaaatatatatactggttggttatgtgcaatgttttatgccctatgccctttcactggtgatgttttaaagcaagcattgtagatgaccatgaattatagcagacaggttcccagtcctatgctgtttcctaatgtacattttttctcttgtcacaactaggaaagtcacgtttcagtgttttggttttggtgaatgcccacaacaaggctagtgaaggaaggaggcatagtaggaagctgttggccagacgagcttttagaagacccttgctacatagagaggacgtagaaaatgtctttatcattaggtgagaaacatgaactgcattctttgttgcgtcatattaaaatgtaaatcacaagaataaattataaaaataaaacctaaccaaaacacaaacaggaggaggtaacagaggacagaacagagttcctagaaaattatattacaggacagacatacaagtacccaagagaaagcaaaattctaaaagtctcttagccaagtgtagagcacaaaagttctcctcagttcatgcactttcgaggcatgtcagttggaaaaagagcatgctataggagacagttttattgtgttttgtgcagtgaccttttaaaagggaaaggtcctttctgagatattttgagttcactcatgcatctgtcatagaatttgcttggaacgaagtgtgcctgtcaccccaacctttcttcagagcagagcctggcttcctcatgggaagaatgatgttttaagagtgtcattcagatggaacagaaagaggtcttctccaggtttgtcttgctactgaatcaataggatctcctggattttgaaaagtatattaaattttttttcagacgtcagagttggggggaactagttttgtttagctttatacaaatttctagcattacttgtacggatatgctggagattctgctgcctcttgcaatctgacagcctcatggagagttgaataaatggtcattgcctgggtaagtgagggctctttctaaagtgttcaagagtaggtcacatagagaggagtgccttcttcctgcattttttcaagtacctgttttcccctattttattcttttggaagggattgattttatggtagtccctttcttttctcacctcttgacagaatgtttttctaaatgattccttcagattattctttaggtcccattaaaagaaacatgctggttcttcattctcattctgtctttatgcttaatgcagatataattcatatttgttttatcaaagtcatttgataacctcttcaatgacaaatccctgattacagatgtattctcttttggtaacccacaggggttgaaattgctctaatttttggtactgtgtattaggttgagattaaaaaaaactttgaggacaatcttttccttatttaatatctggagaaaaaatactacatgtgagaaaggtggaaaaaggatgttgcactgtatgtaataaaagctatgaattttggcacttttgtaaactgtaaagatgtaaatgttccttaattattttcagtagtcagacttatgtttcttccagttgtatttccaggctgagacaatacaaaagatggacagctctaagttgattatcaagctttaaatatgtttcacttgattaagaacattgaaggtgagaatggaattatgtaggcttcactgagtatccgtaaagttgggaacaatgatatacaacacagaaaagaagctccataagaaaacagctgcaactaacccatctggaaagagacctcaatcaaaatgatacttagcgaaagaaaaatactttcagtgatcaaattatttgtctgaccaatgcttggtggaaagattccacattactagttatttgtaatgggtaattgcacaatatactgtattgttcaatctggtgtgaatgaaagtggggagatcttgacaattgtcttggaacaatagatgtaaaattgagactattctgggaaaaccaggatgtttgggccccctggtaatagtctaatcattatacatctgtgctataagcacacaaataacatctagtaatgaaagaaacattcagctaagaaaacttgcagtcaaaaacttttgataaagctgtgaagacttgttaggtcatgtattaatttaagatctttaagatggagagcatcccatcaatgattaggagaaacacaaacattttatattgtgtttaatacacttttttatgtttaataaaaaacatatcacctaccctacaactcataattaacttatataaagttttttttgtttaataaacatttcatattgtgtttaataaaacgcaaacattttattacttacaggtcctgggtgggggcagtacgtggcatgcctggagatgacacacaaggagatcaggaagtgtgggcagggagaatgtggacctgggtcacttgtatttattggagtccagggtgagaaacctaagtgtcatgggacgaggggagcaattgggcagtttaaaacaagcaggcacaaaatttcaaacaacccaacattaaaaaccctttctggcaaagaaatgttatctagaaatctagctgacccaaaggctgagtgtgtgggtttggggtaagagctatcttgcctcaccagagcaacaaaaaggagaagtcatcggctaagctagatagccaaacaaaatggatgctgaggcaacattaaattataagaattataaggtcaagatgggatggagattctggacctggtacaaggaagtgctgcaatgaatagcagggagttagggcagactacttccagtgtcctgagttttcaggtttcatttggctgtcaaaaccatttgttccctagactgtgatttgactggtgatgctggctggcagtgcccctactgatgacttagcagatgactctgagctgacaatttgccatccttcagctgtcttggtaggagggattcagttaccagcatgcacagcacagagcagaatccaacctcatagattttcaaaaacttatcgctaaagtctattattaacagcttggtaagaaaagtctttttcattgagaaatgtatagattattgtgaaggaaaagtatttgctaagaccagactggccgaagctaatccttttgggaatagccttaccaatttgggggaaatgactcatttacttataagctatacctgtcagcttccctttactacctttgacagctcttaaaccagcagtataagaactgctagtgaaaaaataaacattagtataaaactttatgtacctattacataacagtcatatattaggtgtccattttaagtacagatactgaaatagcaaaataatttattggagaaactcaaaatgctatagaaaaatttgacttggaaagcaccacaaatgtacatgatacaagtaaacttgaagaaaccaattacattgggggatagtcttgttttctgttattctgtggacttgctttattaatatatggaatttagagtttcttatatttaaaaaatatgaaaatgcacataatcattcccaggctgctcctgatcctttagtgatgattcctacagaaaaaaaaaaagtgcttgggatggggaagaactttgtggccatcgattttttctttctttctttattatttttatttttttattatactttaagttttagggtacatgtgcacaacgtgcaggtttgttacatatgtatacatgtgccatgttggtgtgctgcacccattaactcatcatttaacattaggtatatctcctaatgctatcccttccccctcccaccaccccacaacaggccccagtgtgtgatgttccgcttcccgtgtccatgtgttctcattgttcaattcccacctatgagtgagaacatgtggtgtttggttttttgtccttgtgatagtttgctgagaatgatggtttccagcttcatccatatccctacaaaggacatggctgcatagtattccatggtgtatatatgccacattttcttaatccagtctatcattgttggacatttggcttggttccaagtctttgctattgtgaatagtgccactataaacatacctgtgcatgggtctttatagcagcatgatttataatcctttgggtatatacccagtaatgggattgctgggtcaaatggtatttctagttctagatccctgaggaatcgccaccctgacttccacaatggttgaactagtttacagtcccaccaacagtgcaaaagtgttcctatttctccacatcctctctggcacctgttgtttactgactttttaatgatcaccattctaattggtgtgagacggtatctcattgtggttttgatttgcatttctctgatggccagtgatgatgagcattttttcatgtttcttttggccgcataaatgtcttcttttgagaagtgtctgttcctatcctttgcccactttttgatggggttgtttgtttttttcttgtaaatttgtttgagttcattgtagattctggatattatccctttgtcagatgaatagattgcaaaaattttctcccattctgtaggttgcctgttcattctgatggtagtttcttttgctgtgcagaagctctttagtttaattagatcccatttgtcaattttggcctttgttgccattgcttctggtgttttagacatgaagtccttgtccatgcctatgtcctgaatggtattgcctaggttttcttctagggttttaatggttttaggtctaacatttaagtctttaatccatgttgaattaatttttgtataagatgtaaggaagggatccagtttcagctttttacatatggctagccagttttcccagcaccatttattaaatagggaatcctttccccattttcttgtttttctcaggtttgtcaaagatcagatagttgtagatatgcagcattatttctgagggctctgttctgttccattggtctatatctctgttttggtaccagtaccatgctgttttggttactgtagccttgtagtatagtttgaagtcaggtagcatgatgcctccagctttgttcttctggcttagtgttgacttggcaatgaggactcttttttggttccataggaactttaaagtagttttttccaattctatgaagaaaggcattggtagcttgatggggatggcattgaatctgtaaattaccttgggcagtatggccattttcatgatattgattcttcctatccatgagcatggaatgttcttccatttgtttgtatcctcttttatttcgttgagcagtggtttgtagttctccttgaagaggtccttcacatcccttgtaagttggattcctaggtattttattctctttgaagcaattgtgaatgggagttcactcatgatttggctctctgtttgtctgttatgggtggataagaatgcttgtgatttttgctcatcgattttgtatcctgagactttgctgaagttgcctattagcttaaggagagtttgggctgagacgatggggttttctaaatatacaatcatatcatctccaaacagggacaatttgacttcctcttttcctaattgaataccctttatttccttctcctgtctgattgccctggccagaacttccaacactatgttgaataggagtggtgagagagggcatccctgtcttgtgccagttttcaaagggaatgcttccagtttttgcccattcagtatgatattggccgtggatttgtcatagacagcgcttattattttgaggtacgtcccatcaatacctaatttattgagagtttttagcatgaagcgttgttgaagtttgtcaaaggccttttctgcatctactgagataatcatgtggtttttgtctttggttctgtttatatgctggattacatttattgatttttgtatgttgaaccagccttgcatcccagggatgaagcccacttgatcacggtggataagctttttgatgtgctactggatttggtttgccagtattttatggccgtcaatttttgaccctgagagtgaacctcacctttggaagttactaccaagcatttgacttttggaagactctttacacagcaagagatctcctccacctttgaggtgaggacattaaacttggtttaaaaaattacttttccaagtacattaactatgtcttatatattatccatacacgattactaagaaaatataaacattttttcatatactggttaattggctttaaagaaaaaaatcccctttttaatcccatcaggatttagtttgacaaatttttcagaaacttataaagatgaaaacacctggatgtatttctctgtaaactttggctgttagcatcctttttcaatgcttgtgtagtttttcagaacagaacctaaccttcaagatgagtcatttgttcccaaacttgaattgtcatgaaacactccttgggtttccctcccgtgctgaatatgatttctaagaatgggatggcatggttactgtataaagatcatttgttctacaggtcagaaggcctgagttctcatcattaattaactttgtgatgtatgttgggtaaatcacttaacctctacagttttatcttctgtaaaatatgaaagaaagactttgagctaaagtttgtttctactgtaagaacatgagatattttatcttggtgacatcatggcttatgggcaggctgaggtgggattagtaattgcaaaagcagtggtcataaggtgaagaaacctggacatgacttcagacttaacctgggaaataaaatcagggaatgtggacaaagtcagacactactttagcacaggatgagatgccagaagatgatggatccaacaaagacatgcatgaaaggccacggggctgtttctgggcttaaacaagctagtcttaattaggagaaaaagcggagggactggaggagtggaggagaggaagtcaatagtgatgcagtacttccatcctagagggtttcttcgagagccaagagttccaatctgtgcatggcattaccccttctgaggtaaaagaaaaagtcctctacaaaaacctgacagtattctgccctcaagccccttgttaaccaggccaaggtgaggcatgggtttcatgccctactgatagcagtgcaagatgtcttgttatgagtattgatatcgaagtatgcttttaaatcatatttcactctgacaccgttagctacgtaactaagtcttagtgctattgccagtggtccaatctaaatgatgtagtagagaatctagttcattactctgagctgggactctgatgaagatgtagggtgacacactgtctttgtgaagaaggcatgtgtggaatacttggtgtctttggtgagatggcagaacttaaaccgtgaggaggatggcaatcatgaggaatggtatcaggaagtttttccagcttgatagatgggaaggaaagcagaatggcaggaagggggccaggtgctatctccttgaaggagggatgaaccgtcctcagggtctgtctgctcacaggcaggagacttataccagaactgtgtttactggaagtcttttagagttcaaagtgaacttatctgagtttgacaaataatcccctacagcaagacaaagagtagtagatgaattatacatttggatactgttggaaagggagaggtaaaatccaagttggaataaagcatatgttatgggagatcatcaatatcattgagcacgggctttgaggattagagttatgatgaagtataatagtacagaatcagcttgagacacagtcttatgtttgttttggtcatctgcctagaagtaaggtgcagaaaatgcttatactttgaaaagtcgtgaattaaatagaactttctagcaatggttgatgaactgggtgggtgtcaaaaatcaagacttcatgattgggaagctgtggggatggggaattttcttagaaaagagagagactctaaatggtgctagtggggtggcctaagccctgacagtggaatgggacctttttggaagactgcacctcggggtaaggatgcttgtgaccctgagactagcatcaacccatgatagaacccaagggtgcagaaacctatgatagaaagcaagggtaccaaaaccttgagggtgttggcagactgaggggcactcagttcacccagggacatccttcacctgagaatgacttttctagatctccctgcagtggttttgagaacctgagtcctagttgagccttctgtgatgccttccaagtcctagcagtgtggcgtgcccacacatctttctcaacaaaggatgcagaaataggaatgtaattagagcagttcatcctcggtagagagtcctttgtggttcccagctgggcagtagtttaaaggatagccctgtgaatctactcaaatagtatctttatttaagatgtcaataaaaggtagtaaacttgagaatctctgagaagcattgatccatagtggaaattacatgtatttaagtatgaaggtagtaaatatatattaacaacacattatatgccagatactgtcctgggtatgagctatagctggaagtcagagcggtacaaaatctaccatgggggagtttaagaccaagttttcaagccaaacggaactggattctactaatttccagactgatgccttggagaggttacttgaatttttctgaatgtccattttctcatatattaaatgaccattataaccttgctctgtaagactgcttgttagatgatataatatctttcaaatatctgttaaagtgcctaataatagcataatagctactcaataagtagccataattgttttaacaaatgaaatttagactcctaggaaaattagaaagtactgcactggctttcctgttttcctaatggccatgattatttatccagtgactcagtgcagattttgatttattttccttttcatagccaccttatcaaaaagtcctgctactgttatttctacttcaaaatgcatctcaaatctattcacctctctctgttcccatctgtatcaccctagtccaagctctcttactccctagagcaatagccggtaaccatgtgcttacaacacattctctgcaaaggcagcagagtgtattttttacagcatatatcagaccataagggcctcttgcttataaaggaccagtggatttttattgcatttactatccaaatctgaagttgccatcataaccagacttctctcattctcttccatgtcttctggtatcacattcctgcactaacctctacaccctgcgtcctcccacctcacctcagcttcaccgtgttctcagtttccagcacgcaccaagctctgtgccacttcgaggcctcacacctgccgatctctctgcctatgattctcttctctatgctctttgctgaaccacctccttcttatccttctgccctcagccttacctcaaccagcccatcattctctcagcctccaccgtagcacttctcatgactggtgcttgcttatttacatgttttctcttgcgcattggccaccacaaaggtaaattcttatctgttgtgtgttcaccttggaatttcccatccttaactcgataggaggctcttattaaatatctttgtaaataaatgatatttttatgatagataattgcagattacatgattgttcagttgttaactctgtgcagtcgtagagtattctggttttaaagattagcacttggtttatatgtgaatgaactttcaaaattagacacgatcttctcagttttcttgtcaaagactgtttctaaagatttgcatgagctagtctggtcctggctatcttcctatcagggatgcattcctgtattggtagattctgtagattaactttctaaatcattcatggcccttccttctgcgccgttaactaggaagtataaagtactttagaacatttcattattagtattcccaatatgaccgtggaaatgtgggcagtgggatgaggcaatcaaactgaggttttctttcatgataactatttttgaaaactacctgcagtgagaaagaattctcaagcaggtgcagtggtgtttgagagaagcataaatggagtggttgagcccagaccttggagtcaaataaacctaggtttgcatctcagctctgttgcttacaagctatgtatttaaactctctgatctccaaagtggttttggtgattcaattagatcattcatacaatgagagtcttaacaaatggtaagcatttttaacttttagaaaaacacaaggcagttagtagacgaagtgtatgaggacattgctagcttaatataaggttctttaagggtaaaataaagagaaagggaagaaaggcagagttctttcttttttaacttcttaaaccttttcttatgaaaagatatgccacataaccataattcatcctggcaattaggtaaacagtatacagaatatgactctcgccattaaataaacttaagcaaggtatctttatcctgaaggaattcttagagatttcatcatgagtaagcacttttcagtatagaattgccaaaatacaaaagaacaccagagaaccactctaacttctaaaaaaaawaagaaacccaaaaccttgtgattgaaaaaaaaaaaaaaagtaagaaaaagaggcccttagtcattctgttcccttttgggcctctatctttcatttcctctggggaaataaagttataaactgtgctggcagtaatctagggtgatgccaagtcagttacccacccccaactccatgtctccaaaagattctttaccaccctttgactctaattaaagaaaacaaatgtttccagttttctrtcatgtacctttccactctgaattatagaatagctttcttgaaattcttttaattgttttttacaaaggattagcattaaattcatagataaaaataaattagtaatagtgatcaaaatgacctaactccactttgtttttacttttcttctgggtaggagggcaaataacataactgcttatatggtgatttattttaaattgaatctgaatttctatttcttaaggcctcattggcttcatggcaaataagagagttttaaagaatttattgtgttaatttctgaraaaccaggagtttactgttgacaataatggcacaaattacaactcctacacagctctaccccctccacttttgagtttcaagacttttgccaaagttttctggtctttgttcacttctattattaacatctcttgtgtgaaggggaattttgaatgaatgggatgaaatcatctaaaccagcttcggtcctaaatatagtgtctggcatcaggtctgggaaaaaaaaaattggtcaaagagatagcctgaggttatttttaggaagttggatgtttagggaaattratactatgaaagttctggcctctatctctgaagatattccattgagagatacatgcatgcattcaacatctcgtttttttccattcctgcccttygggtgttccgcgtcattcactatcttgtcattacagcattaagcagaagcttgaggcagaagatagctaatgcaacgtttccatttggtcctgtaatttttctgcacagagctttataggatttcatttcgggttaataaggggaagttggaaccgaggagaaagcttatgctctgccaacatatactgaggattactaaacttggaggtagaaaatagaacacaggaataaaaatggaaaagtcctggcagatttctccgtagcagacttcatccttaaaaagcagaattccatccagctcttcttggtggcataattccttatcatggaattataagataaatgctctgtttttatgcgtctctcttttctaaagttgaattgagtgtctgaaagacagatgatgtgtctaataccaccgttgttttacagaagggaaatctaagaaaactatagctaccctcctgggaaaacatatctaggcatttgctaacagtcatttaggctgcatctatgcacttccacacagaaggataaatgtcacatgttcgttgaatgatccagatgtttcaaatatacagttgttttatatttggtaaacaatgcagttaggtcatgtaaattttaatttttcatttggagtttatccctatgcaggcaatcatagattagaaagttatttttttcatgtcctacctctttgaattgtcaggttcttttaaatgctgttatgyagcaataaataatattttatccataatcaaggtggatgacttactggatatcagatattattattaacaaaaagtttactacattgtacaartatcactagacaaagacaacctctagaaagttaattaaggtaactaaggttctcaactgcaaccacaaaactttcacagttaataataatttcacagttattaacataactttttsaagaggtactatactaaaccaaggatgctaaatataacttattaatttctgtgatggcttctggggatatcaatattggtatactttcctcactgcaatgaagacacttctgcatctacttttgagatttttttggtcatctttctagcagccagctgtcacctcttgctgctgtaacagttcctagtaatagttcccttattcttcaaacctgatgttagcagggaggtcagatactcaagcatgattagaattgtagaagcttgagcctcatatttaaatgtgtgtaaatatatgtttgaaaaagaattaatgagctcttaattgcagatcaaaggatatggtttgatagtgaagtggcccaatgaaagttgtttgaattttccttttgtctttctgtaaatggaactgtgttcttgaaagcctctacgtctttatcttgttcctcaagattcttagggcagtgcgtgtgggtcaggggtaggtrtgtctgggaattaagagtatctagttgatttagtagctatatttctcttctttagcctgtttattgggaaatgaaagacaatttaggctatttcattttcagtcagtgtctgttatgaattcattggaaayagcaatgtgaaaagaggaatgaatattgtagatttctttcattgtcatatttgtaaattactgggtgggatttataaacaaattattgactaattatgaacaaactgttgtttttttcttttcaatcaatatgaacaatcaagtgacctaacamatttaattttaaaaatagatttgaaaggtatatagtagttaaaacaaggccccttgattcagattgcctgagttcatatctcaaataggctacttttttgtggtgtgcctttaggcaggatgcctcagtttcctcatatgtaaaaaagaaatgttaatagcagcttaccttgtggggttgttgtgagtgggtcaaatgacctactatgtgtaacgcactagagcagtgcttggctggagtaagctccatgtaaatgttagtccttgaatgaaagtagagctctggtagagatattccataaagacaaccttaaacatttttgaaccttttatgcctccaaaatatacacttccaaactcttctatcactgaccatattacttataccctaacaaggaagttattaagaatcataccagagtacaggaataaatcatgccagtcaggaaaaggggtacattggttattctatttataacattacttgagtatttataacaacaagtaaacaaaacgttttttagaaaaagaagagattactgtgttgtacaaatattactagatgggtaatttctctcctttttttccaatgtattccagaacccccatggatatcaaaattaaatgctsaaatcccttacataaaatggcatagtatctgtatactttaagcagattacttataatacctaatataatgtgaatgctatgtaaatagttgccatactgcatttttaaaattaatattattttttaatattttaacctttttttttttttttttttttttttttttttttttttttgagasggagtctygctctgtcacccaggctggagtgcattggtgcaatctcagctcactgcaacctccacctcccaggttcaagcaattctacctgcctcagcccccaagtagctgggattgcaggcacaggccaccacacccacctaatttttgtgttcatagtagagacggggtttcgccgtcttggccaggctggtctcaaactcttgacctcaagtgatccgcccaccttggcctcccagagtgctgggattacaggcatgaaccaccgcgctcggccacatgtttttaacttttatttttccaatatttttgatctatgattggttgaatttgtggaagccaaacccacagacatggagagccagctgtgtattgttattgtcatgtcttttattctcccctgttcttttctgcctaaatgccttaggtacttctttacagagttagatagcatttaccattgataccacccagagtggtgtggtttgcttctyctgaccctttcatgagcaaagctggtttcaggggaaactcagggatctgaacwgttagtaacactgattagaaatgcagcagttttattcaggccttggttttattgaccatttttggttggctcttatctctgtgactgatcatgtatgcgtatttcaaatggataaataaactaaaaagtgtttaatactccaaaatgattagaagtgtattgttaaataccaaaaagaaaataattctggggtgtttcagcatgttattctgttarcrtagttcacgttgagtgtttgtattcatttgttgtttgtttgtttgtaagtaacaggttttgactaaaattccacggactgtggaacarcacacactggggtctatcggagggtggaaagtgggtggagggagtgggtcaggaaaaataactaatgtatactaggcttaatacctgggtgataagatagtctttacaacaaacccccatgacacaagtttacctatataacaaacctgccattgtacacctgaacttaagtaaaaaaaaaaaaaattaagtcatgtagatgcgtactttgaggtacaaccacgtgaatgattgtgccaaattattatgacagaaaagtctattgttgatttagaaaaagaattaacactgggcatcatttgaataatgggctttataaagaactgcacatattggttactggtagtaaaattcacagaatgttagatataaaaagtcctaaagggtacaaggaaaacttggtttgtcctaggtcaactagtaagattaatctacaacccaggcttctgactctatttcaacattcttctcataatgtcattgaggttacacttaataaacaacgttaaacactctctcttttaaaaaaaattgttggctatacatgttggctcacgcctgtaatcccagcactttgggaggctgaggcaggtggatcaccagagttcaggagttygagaccagcctggccaacatggtgaaaccccgtctctactaaaactacaaaaattagctgggcatggttgcaagtgcctataatcccagctacttgggatactgaggcaggagaatcgctggaacccgggaggcagaggttgcagtgagctgaaatcgcacattgcmctccagcctgggcgacaagagcaaaacttcatcccctcccccccaaaaaattgttaactactacaagcataaatatgaatatctacttacctgcatttctgaagctagaccataagtattaacagtgcttatatctacagtccctggcagatagtcggtgtaagaaatatagattaattgaatgaatcatatgatcatggttaagkttcttcttttgtgcgttttagcatttttaaatttttacattgatcatgtattgcttttgaaattttaaaaaacctggcaaaatrtaattacgatagaaactgacatcaaaaagctttgtagctgaaatagtgtaattttacactgagtttgaaacttctgatatcaggaactttgatgagcctaatacaggtgctatacgggatgaagtgaatatgcttagaatttttgatgaaaacaaatctgactaytcaggtttctctatgagaagggtaggcagtttgatttgtaattatgggaagctgaatgtgaggcttggatgaggctttgtcagtatcagaccagctccttcctattgggggctgaattcccttgggctctccatcagagagaccaacaggaagcaatcatgtagttcttccaacacactcagaagtcagtaggtccactccacaaataaattgtaattggccatatagtaaaatatttggtagtgttattcttgtccttttccatatgtacaagagagaaaaataaaacaacttcacatcctcctaagcaagtgatcgagtttagatatttgtcccctccaaatctcatgttgaaatgcgacctcctcatgttggaggtggggcctcactggaggtgattgggtcataggttccctcccagtggtaatgagtgagttcttactctgttagttcatgcaagaattgatggtttaaaagagtctggtgattctctcccctctctcctgcctgtgctctcaccatgtgacatgtctattcctccttcaccttccagcatgattgcaagcttcctgagttcctgaccagaagcagatgctggcaccacrctttgtgtatagcctttagaaccatgagccaaatcaaccacttttctttatgaattattcagtcccaggtattcctttatagcaacacaaaacaggcaaataccggagcaacagatcagaataaataacgctgagaggacctgacctgatttgctrtaggtattgttctagggtagcccctggtatccattgaagactctgaccgtgagctctgcctgcattaatataactggaccaaaggaaacagaactttagttttatgaatgggtgtctctccaaacaatttttcctggctgagctttgttcattaacatttttcaatttctaaagaacaaataatctccatttctctttttatgtccggcccactctcctgatagatataacctccctcctgtttagttccatgaattgtactccagctgcccaaacctgagaaaaggaattaatgactcattctctctgttgagtgagggcttattccagctggctcgcgctattctgtgtgtatggattctgtcagcagggttgaaataagatgttaactggcagttattcattaatttacagcaagaacaatgacttgactctatgtcaaccatttctgaaacattttgactaacatttttcctgttgcttagaackgaacttaaaagctgggacaggcatatggaaagaagcaaggatccccagttatgctgattggaactaggactaatggttttaacacagaatgtttatgcatgtagaatgaaatacacacacacacacacacacacacacacacacatacacgcacatacaaggggtcatactttatgtttgcattttcctctaaaagtatccctaagagtatttgtggttagtactacatttttttcatcatagtttgtttaaaagataaagcagatattataattattttctttacaggtgggaatgagttaaacaataattaactgaacaaaagcaatgtccaggtactgcaaaactttacataaattactcctattcattttcacagcaaccctctgaagtaaatggtattatcccaacttacagatgtggaaactartactaattaacttacctagaatcgaggtggcagagccaagacacgaattcaagtttctcttcctcaaatttaacattctttcttgtacaaatgtaaatgttctttaaaaatgaatacataatggcaggattcatatcaattttctgccagaattaccatgtttacctgaagtaaaatatgctcataaacaaagcagaaagtgcagctggtgcttacatctaggatgattaactggcatgtacagaatttttttttccttcaattgcaaagtgaatgcagtaaaattacagggcaatgggtttcttcccacacaagacaaggtgatctgaatgatatagaagagaaatgccacatgtggaaataatatatcaaggatttattaygtgtctgtggtcattcttaaggtcatttttgatgtctacacatttcagcatttgagaagttgtatattacatgcatacaaacccatattcaaatatacaattggctaaacaagtatttgttttaataaagtagtartaataaaatatttatagcaaaggrgacaagactcaggactgagaggaaaaactcaattaaaaaaaagacaacaatacttaaatctcttgatgcatctacttagcaatgtctacaatagcttttttaacactatcagaatatagagcataaattataatgtttatcctgcttttaaaggaaaatttttctcttatgcaatcatggtgggagaaaagaattcttaacgtgattatttgtctcatattttattttaggattctgttagtgtttttaggattctatcaatgcaaggtgtaagaacatgtcctggcagttgaaggaaagrctaaggaaaaagatgaaagagaagtgtcgcatcccttaccctccttttaaagaaatgctgaagttgctgagcagaargtgccacagtcatgtcccttaatttatccctcaaccttttccagaagtaaagtgactacacctaagctcagacagtgacagtcgtgggagaaaagctttatagraacagtgataggaataaaagtgtgtgcactgggatagatgtattttttaattacagaagtaactactaatctatataagagaggctccttccactctcagagcttccaacttaaccatctgtgaagagtaggtccttcaaaaccaactgtagcggcaaagttctgagrtgatatttccagactcagcagataggaacaggcatgctaggtgagatatggcagggaatattagtcagggttctccagagggacagaaccaatttgtgtgtgtgcgtgtgtgtgtgtgtgtgtgtgtgtgtgtgtgtgtgtgtgtgtgtgacagagacagacagaaagagagtgctttagtttaaggaattggctcacaattatggagactggcaaatctaaaatcttcaggctgggttggcagtctagagactcaggaaaagctgatgttgcagtttaagttcataagatttctgttgtcagaattctctcttgtttggggagaggtcagtcttttgttctattcagatcttcaaccgattgaatcagccccactcaccttatggaggacaatttgcttgactcgaagttcattgatttaaatgtaaatcttgtctgaaaacaccctcctagaaatattcagaataacgtttgacaaaatatccagggaccagggaccatggcccagccaagttgacacaytgaactgaccattacaagtctagttggcacccatatacatctccttaagccattcttaatctccaaatgtggtcacattctgaggaactggtggttasagcttcaacatatgcattttgaggagatacagtgtagtccacatcatggaggtagccctagaatttttttgtttccattcctattggcagagacaattgaggaaaagggaaagttccctttcatttattttactctcctgcacatctaatctttaaggagagaatagaatgagagttggggcacaaaacaaggattgaagggcagctgacttgagtccacgtagccccagaacaaagcaaaggracattagattagtggggtagtagagattaaagaagtaaacagaattgaaactggcagaagatagggtcattgtagagtggaaaaacatatctgaaacatggttgttaagtcataagctaatatttggaaagacagactccacttacttttttccaatagatatatatttactaaaatcttgggaaagctaagcttatgatcaggtgtaaccaggccatatcccttgggtcccaaagtcaataagcagggagagcttggtgtttaagtccttaggaatgggtcatgccactcagaaaagagaagagatgtttcgatctgtggattgttatcatctgcaacccaggaggctctttgattcttcatatcacgttatttttacctgaggattgtagataccctacagtcttaaagcctctggccaatctgccttggaaccacaggatacattaggcaaggtctggggctggctttgacaaaggacacagtattgctggcagaagaaatcactcttaaagggaatatagatgctactgtgagagactgatcaactaattaagatcttgttgaagattctcaaattgagtttgagcttgttgacaaaaaccaggcttaggcagagggatgatgatcctgagagcatcctatctccatcaataggagtatgttttcaacctagtggtttttttttttaatttttattttaggttccagggtacatatgcagatttgttatataggtaaactaatgtcataggggtttgtaatacaggttacttcatcacccagggattaagcctgttacccaataggtattttttctgatcctctccctcctcctaccctccaccctccaccctcaagtaggccccagtgtctctttttcacctctaygtgtccatgagttttcatcctttagctcccgcttattagtgagaacatgtagtatttggttttctgttcatgtgtcagtttgctaaggatgttggcctccattcttgccatgaaaaacaacaggaaaataaagcactacccttgagcatgcctctagaacttgaggttcaagaacaacagaagagtggcagaaaactatatcttaaatatattctttatcttttgtcagtcctcaatctggcaagaacattgctgctacctgacctcatagacatgcatttgaactcctacttttagtatctgctctaagatctgatttaagaacagatagtagaatagaataagcttggttctctaggtatcaattttcccaaatttcacagtagttctatgtacagtcacattgtatattataaaatatatgtttaactgtcacatgcaagtatatttcagtttttaaaagctcaaggtgcatgctgatagtcactataaataaataaatacatatgtcaacatctccctatccccaattcctccctcatcaaaaactaaataaagggcaaatgaataaataaataaaaatgtttaaactgctgaccttcctgtcaacaaaggtgatgtgagttacaagaatctgttttctagctggagatgtgggcgcagtcatgagtatgcctccaccattaacagcactaaacccaacgtactcacaaacaacagctgcatgaaaaggccaagcttagtatcatgtgtaatttatgagagcttgttaaaacacatacatgcacacaaagttgaatgaataataccaggtgatggttaggaaacagaaaattcctgaagcatctcttctttttaatgaagtatcaaaaatactgttttattaaaatcgggagaaaaaaggctttaggccaagtgtgttgggttggccttgcaactctacttcggttacaaatttaaaggccaaagagttagagattgtgtatatgggtatgtgtgttgcaggktggggtgtgggacatatcaatacaataggtaaaatgaatggtggattgtgtctgggataatgtggcatattttatctcaaatcccaaccttatctcccaataggagatttggatcatgagcaagatttggcttaggctagttttcaattcccaggattccagctccttcatagcaccacccttatgcttactaatcccttcatctttaagacacctggataatgagctatctgcatggttggaaatagtctgggtttgttctaaattttacattagataacaggtcagcaacaaaataatgggagggggaaattagaaaacattaagtcttatttcatgtcatgtgatacagtatatatgtattttttttaataaaagaaagtgacatatattgtagttcaattggatatttacatttcatgtagaccataatggtagcggtaattatagaaatcttagcaactttcaaaggaaatttttcccagcaagatgactgacaaaatttttgaaagtaatagagagaaactgaggcataaaatttacctgaaagcagtcctgtttaaattggacaaaataattaccttttcttacatccctcttttagagttttcctaatatcatttaatacatagatagtactagaaagaaaaagacattttaaattaagaccaatgtgaagcattataccmatttagtatcattttgcccattacccttatagaaactaaaaatagaatgagtgctcagagtttgtactgtaactgcctgccacttacatgggataactatttttagttccatcgtccttattaaaggctttcattatgagttcatttatggaaatgttatctcacagagttttttttggagacttttctgagatctcaaaatgaggtctcagaaacatgattagaacatagtcatttagtttcccagcaaatgctgatcctttccaggaaagttctataaataaggaaccaaagctggttgtcagtaatttgaagtagctgggttggaccgtgaatattaatatgtaaattatagcttgtgccatctatacacaaccaggattgtatgcatatcttcccatggtttattttmagtctgaatttgcatacaaacactggtctaattgagtttttaaaaaaaattcttaagagatgccatgtgttacttaaagatgttttgttttgaaactttgtgataggtaagatccactaatgtttgtaaaatttaccatttgtaggaaatattctattctcagtaattcctggtgaaagtggtaggtgggttagagatcataaaatccagtcttcacgggaccaagctggaacatggctgggtagctggtggggtagtgacagccctgcttcaaggagagatcagaaatgagggatgagactgagtgcaaagtcaaggtcaacacaggctaatcttggcttttggctacttttctgtaaagagtaatgtttctctatttgaaggagtgattttaattcagaagtatattggaaaagtgaaagaattcctagagaaaagttaatcccagacaagatagtgaatgacatatagtttattatccagtgacctttagcacaacaactacacatatgcgcaagcgtaactgctgggctgctctggagttcgccagaaaccccttgcccttagtttgaaggagggaaagaaatatctgtaattattgctctatatcctttgcttttgacataattgattctctggcatttaaaatttatatccactcgcccataggattcttttaactctttcattgtttatttccttgtataagaacaggtctgctagtcagagagaatgttgagtatctttcataatccttgtctttatgggaccaaacatttctgccttgtgctagaaagatttttcagcccagccccaggcaaccaccattcattctactctctgcttctatgagtttgactattttagttacctcacaaatgcttttgctgcatttgttttgtattttaattacaccgtttgatggcaatgctagaaatttaggagctacagctcctctctaacatgaatgctatcttgtcaatgccttcagaagaataaagatcataattctttcttttacattgtgatttctataagaatagtttcctatcttcctggatctagatggaagatattaactttcagactaactgttcactggacaatttttctttcattattcctaaggtctttattgtacatatgatggtgtctccaatagttaaatatgcctctaactacaacatataatttaaactcatacctcacctgggattatattgatgatttttggttcaactatttctcaaatttgagatgctattcagaatttaagtgaggtctaataccataggcagggattagaagtccaggccagaagtctgaagtcatcagcttgggttctgttgatgtgaagtgaattggatcacacagagatagacatggccacagtcaggtgtgatacttgatgtgcctatgctttgcctcttagccagttcttagtcattccatgcaccgtgctccttagtagaagagagaacccttcaggtagacttctgtgaaatcctcacaaggcacagaaatttaatggcatttctgagagtcacaagggttctgtgaagtagaaattatgctctcattacattagcttaatgctgagtatattgggactcttgtaaatggacattttgttcatggatattttgttttagcaatttaaagaatgttaactagcttaatattttagagtgaacattttaaagtgataaagaaaaataagaaactttcttatctcaattaaaaatatatatgtatttttggtccacacaaatcacatcacccaaataaktcagagcactttgctagaaaaggcaagacaaggtgtttctgagagtgtctccgcatttagatagactatttagttccatacttagagatcatccactagggtttctttgagcttggtgaagaatattcagcaacttgcctaagctctgggaatgtgagcatcagttatgaatataggtcatctcagtttgtgcacagcacaytttctgtcagtccaatataaacttgtatgagtagatctgtttattgtgataactacaacttatattaacttgttgacatgctttttctaacttattttcttgggtctgcatttttcaaagatcaaaatttctgcatcttcagcacaagtagattgaagaacacataatacggatagtgattaggaacattcaggcatggggaacgggtgacatattgtttactgtgtttaaaagatgtgttataaatttcacttagtcaaactaacttgatgaaatcaagatagcctatgaggaagaataagctctgcaacttacatttttatatgggaagaaataatgagtcagtcttcttgaagttttttacattattatagtaagaacatttaagatgagatatacccttttaacactttacattttaagtgttcaatatagcattgttaactctagataggacgtttcatagaagatcttagcatctgacgtaactgaaactrcatgcatcgaatagcatctccccatttctcccacttcccagccccaggcaaccaccattcattttactctctgcttctgtgagtttgactattttacatacctcattgataatggtttggatgtttgtcctctccaaatcgcatgtagaaacatgattcccattgttggagatggggtctaatgggaggagattggatcgtgggggcagatccctcatgaatggcttagtaccatctscttggtgataagtaagtttttgctctgagttcatgtgagatctggttgtttaaaagtgtgtagcacctccccaaccgatctcttccccttttgccttccaccatgattatgagcttcctgaggccctcactagaaatagatgctggagccgtggtggtacagcatgcaggactgtgaatcaattaaacctcttttatttcttaaattacccagcctcaggtatttcttttctttctttttttttttttttttgagatggactgtcactctgtcactcaggctggagtggagtggctcactgcaaccttcgcctcccgggttcaagcaattcttctgcctctgcctcctgagtagctgggactacaggtgcgtgtgcccacgcccagctaatttttgtatttttggtagagacagggtttcaccatattagccaggctgctcttgaacttctgaccttgtgatctgcccgcctcaggctcccaaagtgctgggattacaggcgtgaggcgctgcgcctaaccatatttctttatagtaatgcaaatggcctaacacacttatgtaagtgaaatcatgcagcatttgtcgttcttgactgggttatttcctttagtgtgatgtcttccaggcacatccacattgtcgcatataatgaagttttaataactgttctaagacttagctgaagtcaaatggaatgcttctggtacttccctcatagcttatctcctggccttgactatggccatttcctattcccaccctgctctccaaggtggtattctagccatccttcaaggtcctgtgcgaataccatctcctctaggaaggcttcctttggtttcaaggcagagttcaatcgtaccccatctgaaaaccaatgacactttggagtacctcatgatagcccttcacaaacccctttaatgtgactgtgtgtgtatcgtctctctacagtgagaataaaagctccaaagccaggaactatatcttcctcacttcctcattctccacgggaccttgcgtttaataatttaacgaaaattcaacaagtatctgttgatggataaataatcatggaaaataaattccagacgaggtcagataaagtggattatatgggtaaacattgtggaaagtaagcttttcgaaatattgtaactggtgaaaagttgtccatcatagttaatgggctacctgagcaaatacctttcctgagctttttcttgaattcatagaaacttgggtctgaaagaaaacttacaagtcatcactttttttttttttttgagacaaagtctcagtctgttgccaggctggagtgcagtggtgcgatctgggctcattgcaacctccgcctcctgggttcaagcgatttttctgcctcagccttctgagtacctgggactacaggtgcacgccaccatgcccagctaatttttttgtatttttagtagagatggggtttcaccacgttggccaggatggtctcaatctcttgacctcatgatcctcctgcctcggcgtccaaaagtgctgggattacaggcgtgagccactgcgcctggcccaggtcatcacgtttagcctctcagtcctctatgttagaaaacagtaatccaaaaaaaaatgatttctttaatgctagatagtggctgaagtaggactagaactcaagtattttaaagcctgcttcacatttcttgttactaagctgcactgcctcccacacatggcctattttggtctctaaactgtcatgaaaacagatgctaggtccctgtcaaaatgtttgtgtatttctgggtgtgaaaaggtatgtgtgtgtatgtgtgtgtttgtgtctgtgctcatgtgcatggatccctggtggaggggagagaaaggcaatttgtagctgcagacttctgtcattgcacgcagcgcactctgccatggtgagttcatactccacagcaacagaacagctgctgcaaagggttggtgtgctattttcatcttgggtgtgtgttttgcatcaggctcttggcaatggcaagagtaaacctctgtaaagaacaccttcttaaccttttactgttacccacacttagtcaacagaaacaatatgtttaacaggagtttttcctgctggacagttaaatatgcagttcttgcatatgaaacatgaatattttgttcccttctgtggaatagcaataataataacactactagtaataccagctaaaatattttaagtgcttatttcaaacggaaaattttttttttaaatgccagattttttctctctagggcaacagtcatcttgtataactttgaattcacactaaaatcctctgtagcaacataaagatagaaaaatcctcctttcagcaatatggcactgtgtgcaatgagcaaatgcaatgatatagaaggaagattgagtttaagagtatcagcagcaaagtgacagaaacgctcatacattaaaaactaaaaattagacttaattggttataggtgggaggagcctattacttttggtgaggacacatataggtgggaaaaagagaaagaaaaaaagaacatatctatgacaggaagcttcacagatttcattttcataatactttttgagactaaaggaaatagaacattttctgtcatatgtgttccaagtaatgtcattctgtttctcatttgtcttttgacctggctgtataatgtatgtggtgaaacagaactcctttattattaattttttagtggctacattagtaactcttttcctgacaattatgaggaagctcttgtatattgacaagagcataaatctatcaacagccaggttcatacatagagtccacctcttaaaggttataagatactgggcaagtcatttcatttctttaaacctgtttcctcatctgtgaaatgctgatagaatcataccttacatagatcagatgtaaataaaatagtcgtaagttagcgctcaggaaattayagtattctgtgcaaatcttattaactttgattttgtttcatatattgataaatttacatctagctgaaaatacattgaatcattgtcatggactaaattttaatatgtcttaggaaaagagtccgggttgaagtgcagtggtgcgaygttggccccctgcagcctccgcctcacaggttcaagtgattctcctgcctcagcctcccgagaagctgggattataggtgcatgccatcagacccagctaatttttgtatttttagtagagatggggttttatcatgttgaccaggttgttctcgaactcttgacctcaggtgttctgccggcctcagcctcccaaagtgctgagattacaggcgtgagccactgcaccggtccaggacaagaatatttttgaaactatgagctttatcatcagagacattaaaacttcagaaggaaagagacctttgagttcttctgagccaactccttccttttatcactaccaacaacatgaagtcagagggaaatgacttgcmtacagtaagatgagcaggaagaagtgaaagcagattaggggctgaggtcttcttagtttatgtccagagatctttccacttcacccaccatactctacattagtcactaccacgaccatcatcatcattatgaccaaaattaaatctaaacaacttttcaccaagtaattccattttcatgctaaagatcaggcagttcacttccatttcctcttttgtcagatgaaggaattgggccgggcgcggtggctcacacctgtaatcccagaactctgggaggccgaggtgggcggatcacgaggtcaggagatcgagaccatcctggctaacacggtgaaacctgtctctactaaaaatacaaaaaattagccaggcatagtggcgggtgcctgtagtcccagctactcaggtggctgaggcaggagaatggcgtgaacccgggaggcagagcttgcagtgagctgagatcacgccactgcactccagcctaggcgacagagcgagacttggtctcaaaaaaaaaaaaaaagaagtaattggatgaggtgatttatgtaattcctacaacctctcagtgctaacaaagcaacattcaatgacatttacaatgatcatggtggcaagttgggagagagaaagggcatttctgaagtaataataaaatgagtaaaataagatggtagtgccgtgtgttgatattgtgaactttacatttttactttctctcatccaaatcacagtaaaggagctgaaataagattttagttaattggtagccacacatgcccacaggctggtatgccaggctttgtttttctcacactgctgtaccatatccaaggccagagtgaatttcaggtgtcatgggctctacaagggcaagactggagtaggagctaaagtcaagttcccattggagaggattgaccaactgatagaggatggaaacgaagagccaaaggggagaagggacaggaagtactgagatctgaaagcaaattgcctaacatttagaggtgagaatgtgaaatgaggccaaccagggctggtgcagagccagaacaagggaggtcagaaagctaaggtgaaattctggaaataaatatgatgagagcttattgtaggggagacttttgggggactatggcctcgatctgatgkgtctgcttgtccccagtgctccttcaaacatgctccttgaagcttcatgcctgccttagacagccagagattgaaaatgaacatatattttgaaaacaaagacactaagaccattcacaaaaattcaagaagtaattttttaaaaaaaatacagtaacatttaaaaaatatatgttatttcacaacatatgtaaaaccattaaaatacattgacatcccaacacatattttggggtgtcaaaaaagaaatatggcagggtgcagtggctcgtggctgtaatcccagcactctgggaagctgaagcaagaggatcgcttgagcccagttctagactaacctgggcaacatggcaaaaccttgtctctacaaaaaatagaaaaacttagctgggcctggtggtgtgtgcttgtagtaacagctgctcaagaggctgaggcaagaggattgcttgagcccaagagtttaaggctgcagtaaactaagctatgatcatgacactgcattccagcctgggtgacagagcaagaccctgtctcaaaaaaaaaaaaaaaaaagaaaaagaaaaaaaatagaaatagtatatgttgataggaagcttagtgaagaacattaaaaagatttgcttgagctcttggttgccatggcagagctgcgggagctccgggctcagaagatggtggactctataaagaagcctcttgagggagttacatctgggagttgtaatttttcatgttcagcaccagatgttttgaggacaggcaggtgtttatgcagcaggtgtggcagtgcacagaggactgccacatgcctctggctcaagaccaagccttgaggaccacggagataaagaagttccaatgccacctgtcccagtgcaccatgcattgcaacgacaaagccagagattcactagatgcagggagtgaggatctttaggcgaagtgacagctggacagttgtgtgaccaagtgttgatcacatgcatgtcaccctgacaatgaccaaggagatgaaggagatgttctcatccactgggatacgtatcttggccagtaaccatcagggctgaggacaggaatctgtttaacaaaaggaaggagaattttagtctttaaggatgtggggaaaagaaagagagatcagactgttattgtgtctatgtagaaagaagtagacgtgagagactccattttgttttgtactaagaaaaattcttctgccttgagatgctgttaatctgtaaccctagccccaaccgtgtgctcgcagagacatgtgctgtgttgactcaaagtttaatggatttagggctatgcaggatgtgcatagcccgaraaacacccacaggtgtggaggggcaggccaccccttcaaaggcaagtgtcatgaatgaagaaattaaggatagcaacaagtataaggcctatgtcacttgcctttggacaaaggtccctttatatttcaatcctggaaagtgaaatgaaaaaactagtgctaaaattaggatcaaagatagtacaggaaagtgtatttaagtcaaaatttcatgtggcaagtgcttctcctggcagcaggaatatccttgtaccaagccagagccttccaaggtacaagttctttttcactatataggaaccgacagactggcagggtcctctaatctggctgtgatctggtggagtttgaggagaggtgtttctgtttggtgtgaggctcctgtttaccagaagtgttgctgcaccattttccataaacaataaaacaaaatccatgagataattcatttagtggggcaaaaaacgtttgttggtctttgttttgcttggttttgttttatatgtacaagggcataaagttgacttaggatgtggagttgggaaggagagtagtttggataagatctttgaaaggttgcttatgggtatcctttcctggtcatcaagatgtggatgtrcctctcttgaaattcttactcactgcatctttcagcctggatatgatgcaaaaacatgagcggtgacttcacatttaggtttgaaagcagagcttccctcttattggctgatggttcctgaggatgtctgcagcagagtggcaggacaatctagcagaaatattttccacttaaagagatagggggtttgtgtttggatttggttctgatatatacctgtatccaggaataaacagtgaaagaggaaccgttggctacataattatgagagttgtgaagtgctgaatttggaaaaacccggctttcatagaacagaatggaatgaaagcccaaacccagcattgcttacgtagcccctgaattaacagaaccctattgagataataccctgccaacagcaaggtcaaagaagaagaagtaagcgacttggctaggatgagctgtgacttccttagagcaaaggaggggcagccccattaccaaataccacttttgcccaggcttttgtgacatgcagtgctcctgcccagcatggcaccttattttgacaaggaccttgttatctttccaccaagttatcacttgaaatgataatatagcttgtatgttgttcccaagctgtcgtatattttcctggttgtttgawtttaacaatgagaataataaggtttaatactcctccctaagaaaagatttgcttatttcccaatttgaaattactttgctaagagggatataatgagttctatagtgaaacaagtatgtgttttatcctaatttctgaaattattcctgaaaattcaagtccattgtttgtctcccaccctatcctttggttctgtcacctcagaactaacaccttgacaaagtgtttcttttttgtccttctaccctccccgcaaaagtttattttttaataaatcgtttctggcaccaacccaaaccacaattacttaaaaagaaaaaaaaaatagcccaggattccatttacttataaacttgctttctgaactttatttttaatttcagcatttttttttttttttttgagatggggtctcgctctgtcgccaggctggagtgcactggcgtgatctcggctcactgcaacctctgtctccctggttcaagcgattctcctgccttagcctcccaagtagctgggattacaggcacacgccatcatgcccagctaatttttgtatttttagtagagacagggtttcaccatgttggccaggatggtcttaatctcctgacctcgtgatccacctgcctccgcctcccaaagtgctgggattacaggcgtgagcctctgcgccgtgccattttcagcattttttgatrtcagttatgggttcattgttttcaatataagataacatgagcagagactgtgtaggtgggattgagagtgaagactgggctcattgacaacctctcatcatctcgtcaagcagagtttcccatatcctctgaatctatgcctgtgtaactccaaatattagcataaatataaaaaattcatccatttggatattttatctacatgatattaattattgaaatgaatctaaattcttttcacaatgattttggcaagaagcactggcttggagtaaagtcagaaaacatgacacatagcaaacatttatagaccatctttttaattgtccatatgaaaagaataacatctagctgattagatgtattttaggggaatttgggaaagaataaataactctatgccttatgactgtcctgatatctgctatttatatctctgttctgggcaaagaacaccaaaaccgaatgaattaattgttgtgcatgctattatgtcttggatatagtaatatcaacatttatacaaatatcgactcagtacagataaaaaatagaaagtaattttcatcttttgtttttaaagaaggaaaaatattattatagaccctgaaccttcttcttcactgaatgggaggaaataaaagatatagaagcctgaggaatataaaataataagaaggtaatgtgatagaaagtggctgaggctatgtagtttgaatctccagaaaaggcctctctgagaaggagactttgagcttggagatctgagtaacaagaagaagccaaccatgcagggaacagtatttcaggcagagggaatagcaagcacaaatgctcaggtgtgaatgattccagctgtggtagccagagtctatgatgcaagggctaggaggggtggtagtgaaaggagtttgcattgtatttgaacaccaggaggaaaccaacacgtagcattaagcaaaaagtggtatgatatgatttatagtttcaaaagattacaatggttgttctgtaagaagataccagaagaagcaaggagaccagatgtggctattttaaaaatttttcgttgatacataataactatacatatttatgggatacatgtgatattttgatatacacatacaatgtgtaatgatcaaatcacacacttaacatatctgtcacctcaaacattatcatttctttgtgttgggaacatttcagatctgttcttctagctatctggaaatataaaatatattattgttaattatatgtcttaggctgtttgtgttgttataaaattaatttataaagaaaaatatttatttggttcacgtttgtgatgtctggaaaaattcaaaattgggcatctgtatttggtgaaggccacaggccacttcccctcatggaggaaggtatagagagcccgtatgtgcagagattacatggtgagagaggaaacaagaagggaacaggaggaaactagcagaggaagaactcactcttagtttctgcaagaggaattaactcactcccgatctccccactccctgggtaaggcattaatctatttatgaaggtttcacatctatgacccaaacaccttccattaagccccaccttcaacactgggaatcaaatttcaacatgaggtgtatagaggcaaacatccaaactgtagcactatagtcactcgaatgtgctgttgcacactaggacttatttattccttctatctaactgtatgtttttgcacattaaccaaactgtcttcattcctcactccctcatccttccctgccttcagtactatatttctactctttatcttcataagattcacttttcagcttccacatatgaatgagaacatgcaatatttgtgcttttgtgtcaggcttatttcatgtaacataatgacctccaattccatctatgttgctgcaaatgacaggatttcattctttcttgtggctaaataatattctgttgtacacatttaccacattttctttatccatttactcattgatggatatttaggttactttcatatactgttattgtgattagtgcaacaataaacataggtgtgaagttatccctttgatgtgcttttttccttttctttggatcagtccccaaattgagattgctggatcatatggtagttctatttttagttctttgaggagtctccagactgttttccttaatggctatgcaaatttccattcaacagcgtataaaagttccattttctcggcatctttgtcagcatttgtaaaattttttttgtctttttgataataaccatactaactagggtaagataatacctcattgtggttttgatttgcatttcccaaataattccaggaaagagatgacattgggttagattagaggggaaccrggggatgagtacaaaagatgaggagaagttagaatctattttagaaacagagtcaacagaactcaccaaatagatgcagttaaggaagcaaggaaagtaactaagggtaacacctgtttgtggcttaagtaactgaataaatgggggtaagacaatatgagacagcaaatatttggggaatattttatgtggtatttttggaaaaaggtgaaaatgttattaatttaaaatctattatgcttccaattgaagatgaaaagaattgcctagaaaagtctggaactcaaggaagaggtcagggctggagatataaatttagaagacattggaatataggtttaattaaagccagttggccagatgagatcctccatgtaaagattatagatagagaagataagagggatcaaaaccaagccttggggaattccagtattaagagttgccagagaaagaaaccaacaaagacagaaaaagcaatcagtacggtgggaagaaaccaagagggcctgatgtcataaaggcatttcaggctagagaaagtgtttaattaaagagaagaaagaagaacttccattgcatttggcaatggaggtcacatttgtgatctggacaggatagttgcagagagtaatgagtttaagttgtacatcaaagtaaaagacacacactctggccaaaggaacagccacagaaggctggcatatgatgtgcctggcacgcaagttttggttttgtcctttggattctcctgttagatatatgtggctgttaaacaaggtctcagaaataacggcttggtaatggatgattctgacaggatacaagaaatcccagagtgttaagctcatcaggtttattgttagttcttgtttcctggaagtgtttgaagccttgactctattaggtgaaatatgactccattaaattgtctgacattttaatactttaatttagtgccagggaccacttttagtgtaaaatgtttcacagagggttctattttaaactgcctggcttttgtaactctcagttttttcttccaagcctttcaccagtgtaaccatcccaaatttgcatcttgtctgatgctaactgaggaagaagggcacctggagtttgaccagcaggaacaaaacatgttaaaattgttgcagaagatgatgaggtaaaaacacatagcactggggcacaaaaccctggagcctggagcctgttgcaggtgtttagcactgaccttccacataaccatgggtagccataggacctctttaaccctcagttttcacatttgtaaaggcagtgagcaggaattgcattttaaatatacaattgttgtcactggtagcatctatctggggccagtggcacaggagtaaagagaatttacccagacagttgtgaggaaagaaagccatattgattagagaaagcatgaaaatacgttgcaagggtgcaatgggcaaatcagcaagataggagctgactgcaaggagacaaaggcttgctggggattttatgggatggcgcttgtgctggggagggctatgtgctttactgataatgccaaagttgtagtaagctaacttgcagttttctattgtctgagggtctgatagtaagttgggcatgagaagattgttagtaatttgcacagaagggctatgtgtcctggaccatgaagaaaggcagacttgtagcttatctgctttttctttttggtttctcctgctcccaacaacctgactccttttctctaattaggacttcacaagtgtggcatctcatgtattctaaagtatatggtgaccatctaaggaagttggtttgaatgtgcaggtctagcaaagaacatgccctggatataaaacctaggaatcaccatctgatcgaagatggagatgaatgacttcaccctagggcaagaaggacttaagaagaataggaaggatggcaggaatggaggaaaacatkktggatggaaagatgagacactgaaacaatttgaagattggaaggtgagagtctgaggtccaaagctttacaccagttgttgaagaaccttgatcacaggccagccaggacctcaaaggctcaagagaaatgatgacaaggtttgcttggcttatttagagctgggctatagagcgggaagattgtggttaaatcttagcagaactgataaaaagcatgaagttgtactgagagatttttcaactgtacatagttgcagaaagaaacaacctgctaccatagtaaatatttgtgttagaactcagtggatgaaggtggaggggggaacatggactggaggggctaacagagtatatgtagtaggcaagtgggattggagtacaagggaaggatagctgggggtgacgaggttgagtctgtgaatgagaagggcttaggtcaatttctctttctacccttcttccagctcttctcctccctctttattcctcccctcttccccttccccctcttttcctccttccctctgcctcctctcttcttcctcctttctgcctttactttatcctttaaagtcttaaaaaacaaaacaaaacaaaacaaaacaaaaactgtgatgatagaacccaaagtgtactgagagatttcttaactgtgggcaggattgttaagtggtagtaaactcaagacaacatttatattgcactttacaatacataaagcactttcacgtaattaactcctttgatttgatcatcacaacaatgcctgaggctaatagttataaaccttgttactgatgaagaagctgaaattcttatcagttaaatgtgttgctttgggcttagtaattggcagagcaagccaagtctgtctccagaccccgtggtcttctggttccaaattccatgctcttctcattatacagcacaatactttttttttttataaaatgggaaagtctttttttttaatgtatttacagacagttcatggctttagacacacacacaataaagccatttttattaaatataagaaagtggagcaaatttgcgtccttttttattttctaatgacaatgctaaaagctaaaaggcaattggccattgacgggagaacaaaggaacctgaataattgataaaatgtattctaaatccagaaactgtcaaagtaggcgatgtcagagatgctgcagttgcttggttgttcgtgatatctgatgacgctgcatctcagtcataaaaacttcagggaatctgaaagaaataataatgcgccatggtattttgagcttatcaccacaagaaatactctgtaattgcatcaaatgattataaatggcatattttagggacataataagcaatgcaaaggacaggtctgcttattagtgccaaaatttgtatttattcccatrttgctttttttttcctaggcattttccggcatctcatttctgactattaaattataccccaaatagaatatgtaactacatgtaaccaacctattttggtctacattaagtgcagcagcataaatagaaactgaaaataatcagaagcatttagaatttcgtttttattcatctgatttacttggccttttgtctgggatgtaagtgattctgagcccctctccagactcacactttccccaggtttcagtacctggggctcacaatctcagtggaagagtttcaaggcaatcttccactcaggactccttatgccttgcatgcacacaaagcagcgttgctcaaaacataggaaacaactatgaggaataaaaaggaaaagcttgttccttaaagaacgagaaggaggccagcagtctttttcataccttcttgtttatagaaagcagatttttttttttttttttttttagtaaaagcatatttggagcaggaaagaaatatgacctagactgtgttgttttcttttattgtatctacaaatagtttagctgaagtgagcttttcagttattgattttaaatcataagtttaattcgtcatcaaggcaacaacaaatgtgatgtttggggcagatgcaaagttgaagtatgtctaaagaaatagcacgctagttgcgtttaatgtggaaggtaaattataacaaaacaaactaaaaccccacaaactstaaagattttcccttatagttatagaaattaggaaatgccctawtgtgcatctttccttcccaactgtacygagattttgaattttttataatttgtactaatatgtaactagaccagatataatctgttgaggctttcttgtgatggaaagcaggtgaaatcaattttcagttgaaatatgcttttcagttcactatatgatgtttgtagggcttttttagagaagggctttgcatttagacttgagcagtttagcaggcttcgtcggagggtaaatctggctgctggatctagttggaatgttttcytttcataagaagagttggagataaagtgattcttgctttcaaatacacttttaacaatacaaaagaataattgaagactttttcttttgagacagagtctcactctgttgcccaggatggaatgcagcggaacaatttcgactcattgtagcctcracctctcaggctcaggtgatcctcctacctcagcctcccaagtagctgggactacaggcgtgtgccaccacatctggctaatttttgtatgttttgtagagttggggttttgctatgttgcccaggctggtcttgaactcctgggctcaagctttcctccctccttggcatcccagagtgctgggattacaggtgtaagccacygatcccagcctaattgaagacttttgtatgttaggtgctaagtaatacaaaagtaaaagtgccactgtttctgtcctcaaggaatttacagtctggagaaggagacaaaatataaacaaacacactgataagtaaatgattacaaattgtgccaagtgccatgatagaaaagaattgatgtgcattatctctgtgctccctgttaggggcacctgacccatcaggaaggccattgatcatacccatcagtcttccaggtataccaaggacattggattgaatgtcacaggacctggattcaagccctgccatcgaatccagctgggtgtttctgggcttcagtttctgtatattcagtaatagtatcgaatattagtgggagtaatagcattgaatgccctccatgctcactggaacttcatccacaattacmatgtcttggtggctttctaagtttttttttaatttttaatttctaatttttgtaggtacacagtaggtgtctatatttatggggtatgtgagatattttgataaaggcatgcaatgcataataatcacatcatggaaaatggggtatccatctcctcaagcatttatcctttgtgttacaaacaattcaattatgttttttaagttattttaaaatgtacaaatacattattttggctatagtcacactgtcatgctattaaatgctaggtcttctaattattttttgtaccctttaaccatctctacctctccctgatcccccagtacccttcctatcctctggtaaccatccttccattctctatctccatgggtycagttgttttgatttttacattcagtaaatgagtaagaatacacaatgtttgtctttctgttcctggcttatttcacttaacatgatgaccacagttccatccatattgttgcaaataacaggatctcattgttttcatgaataaatagtactccattgtttatatgtaccacaatttctttgtccattcatgtgttgatggatacttaggttgcttccaaatattggctattgtgaacagtgctgcaacaaacatggatgtgcaggtatctctttgacatgctgatttcctttcttttgggaatatacccagcagtgggattgctggatcatatggtagctctgtatttagttttttggggaaatcccaaactgctcttcattgtggttgtactcatttacattcctagtggctttctagaacctcctcttggggagccatatggaaattttgctgaaggtgagaatatggcagcttgatgcaatgcagtgttttttcaagcttcttaatttgttgttgttttgagacctaagtctcaggagagatgcaccgaggctgctgcagagctgtagagaggagatgaggagcgagcaaaggaggtagggttggaggcgcagggcatctcccaccctgacttgtctcagacatgcccctcctttatctgttgattataccaggcttacagggaggattttatccaaagaattcacctgctaaaagaggaaaacattttaaaattactgttgtagtccaaatagtctctggaactagacgattctggattccaaatatagacatgtggtgcttaacgacagggatactttgataaatgcattattagactattttgtacttgtgtgaacatcacagagtgcacttacatgaaccctgatggcaaaacatactacagacatactacatactaggcttatgtggtctagcctcttactcctaggctacaaatctgtacggcatgttactgtacttaatactgtaggcaattgttaatacagtggtatttgtttatctaaactatcaaaacctagaaaaggcacagtaaaatatggtataaaagattttatttaaagtacacctatataaggcacttcccatgaatggagcttgcaggactgcgtgttgctctgggtgggtcagtgagtgagtggtgagagagtgtgaaggcctaagacattactgtacactactgtagactttataaacactatatttaggctacctatatttatagaaaaatcttctttcttcaataataaattaatgttagcttactgtaactttctgacttaataaatgttttaatttttcaaaactttttgactctttttcaataatagcttgaaatacaaacacattgtacagctgtataaaaataatttctttttatcctcattctayaaacttttttgaatttttaaattttttaatataatttttaaaattttgttaaaaacaaagacacaaacacacacattagcctaggcccacacagggtcaggattgtcagtatcactgtcttccacctccacatcttgtcctactggaaggtcttcagggtaaataacaagcacgaagctgtcatctcctataacaatgccttcttctggaattcctcctgaaggacctgcctgaggctgtttcacagttaactttttttttttttaataaaaaatacatgtagaagcagtacactctaaaataacaataaaagtgcagtatagtaaatacataagcgaataacagtttttctaatcattatcaggtaatatgtactccatataattgcatgtgctagactcatacaagtggtagtgcagtaggtatgtttacgctagcatcaccgcagacacatgagtaatactgtgacattatgagggctatgatgtcactaagtgatagaaattttttagctctgttataaccttataggtccacatcatataggcaatccatcagtgaccaaaatgtcattatgtagagcatgactgtattagttcgttttcacgctgctgataaagatatacctgacactgggcaatttacaaaagaaagaggcttaatggactcacagttccgcatggctagagaggcctcacaatcatggcagaaggtggaaggcacctctcacatggcagcagacaagagaagagaacttgtgcagggaaactcccctttatgaaaccatcagatctcgtgagacttactcactatcacaagaatagcatggcaaagacccgccaccatgattcaattacctcccaccaggtgtctcccacaacacatgggaattgtgggagctacaattcaagatgagatttgggtggggacacagctaaaccatatcagtgactacagtactatagcagttgaatagttttttttaaatcccttgagtatcttatgatctataaaatggcagtcaagcctatcctgtggatatttgcaaggcttataaatattgtctggaagagaaagatgacttaggagtatattataactcttgatgtttttattatatttgtcattaatgtgcacaaattataaatgtattatcattaataataatttatttaaaaaagtgatgggatatcataaaacccttgggtgaattcaaacatggccactttgtatgacaaattacatgcttctatttctgttccacccagggtttcttttgagcagtggaaattcatctggaaacttaatgttatcccactatagagagccattcttgatgtgccactaattctgccaaataggctgacttgactactctcttaggatacagaattatatgaagmaaaatagagttgagaaggaaaaagtacaaacgttgtgtgtgcatataacaaacagatgactgctttagacatatttggtctgtaaacacctgtggaatcttgcctgtgtctctaatttttccagattttgctcatgggagagacacaatttgttctttgaatgtagccattatattttaacatacatgctgatttaatcatgctggtcaaaattttctttttatagcatccagacagcttgtgcatataactacatgcagttttattttgtggccaactggcaaccatatggaagtcagttaaaatgtattttgattatatgactctgtgcacataggcacatcatctcaggaaggctcaggtagcatagaggcaagtgaattcagcctgagattacagtaaagacatgaatctgatagtctggcatttctggactcacactgatttcttgaagaaaagcccatacagttggaatcagtgccttaaattaggtttcttaatatgatgagctcataaaatatgtgttgtccygccttcttcagatgtgagagttgatgttacagagatctctttggtaatatgactattttaataaaatattcacaattaaaaatrtatagaagaaagcagcaaggaaagactagaactaatgattagagttgttgaaaatgcatacataatttactccctttttaaaaaaaatggaactgggctattctgttgtacatagacttttgtcaaaatcaaattaagaatactttactcagttttctttttcttcctttattcatctctgtaaatatgattttaaaggcccttgaaaacaaaataattatcttattaaaatttagttacatgttgtgtttaaaatgctaaagttttggccagcygcagtggctcacgcctgtaatcccagtactttgcccgagatgggcagatcatgaggtcaggagttcaagaccagcctgaccaacatggtgaaaccctgtytytactaaaaatmcmacaacaacaacaacaacaacaacaaattagccaggagtggtggtgcgtgcctgtaatcccagctactcaggaggctgaggcaggagtatcgcttgaacccaggaggcggaggtcgcagtgagccgagattgcgcaacagagtgtgactcagtcttaaaagaaaaaaaaaaattctraaatttatcggagaaaacaattgggatctatttttagtctcaaatgtaggcatatacaaaaataatacatagtagttttctaagtactattagacatttgtttcccattttgccatttgctttcagtttacctgacatgaagataaaaatgatagctatttctcacttggcatttgaaagacaagagcaataagaaacccagcaaaactcctagagaattttcatggggaaaataagcatattgacattctttgacttttgtaaattgattttttggctccagctgctctaaagccattaagagttagagttaatcattcttgatttttttattgttagtcagttcccttattcataacactgaataatagcaatactactgagttttatttgtgttcacatttagtgctatgttaaaaaattcacaaagtaacatactgaaattcttgcaggtaactggtaaaatatgtagtctttagtagactgttgattgatattctagtaaaagagtaaatcttgtgaatttcagaggtggtcccaagatggtcttaaccctactgtgttaaaaaatatcagcatctttttcctataaagacaacctgaaggctcttttgaaatatgtataagtgcttctttttaaaaaacttattgatcaaatcagcttaattagctatgaaaggaatgatccttcacccctatgttaatgtctgtttacactgtgagtttgtaaaagcttctgatagagattgatgccatatctaataaattatcccactatatattcataaagtactatgattatatctatatgaatatatatataggtgaatgtagattcatatcaaaaattgaaacccagagaaaaaacttggaatttggtaggcagaaccatgaccctcctcaaagaagtcctcaccctcatccccgaaacctgtcagtatgctctgtaacatgattaagggcaattaacattgcaggtagaattaaagttactattttagtccatttgtgctgctataacaaaatgcctgagactgggtatgtataaagaacagaaatttgttttctgttctggagcctaggaagtccaagatcaaagtgccagcaggttccatcatctggtgagtactgcatcttcagrggggaggggaaaggaacagtatgttctcacctggcagaagaacaaaagagcaagctaccaaacactgccaagcctcttttatagaggccttaatcgcattcgtgagggagcagccctcatggcctaattacctcttaaaggctctatctcttaaaactactaggttggcaacacctgaatttaagagggggcataatcaaaccatattattactaatcagttgaccttaaaatagataatcctggatgatctcggtgggccccttgtaattacaagtttccttaaaagtggaagagggtgacacaagagaagtgagagtgacgtaatgcgaacaggactcaacacaccattgctgactttgaagaaggaggcctgaatttcaatagccacggaaggggacaacctttagaagctggaaatggcaaataatactacccaaaagccctcagaaaggagttcaaccctgacagtacctttattttagctctgtgcaacctgtttcagactgctgcagaaccgtaagataataaattcatgttgttttaaggcactacatttgtaataatttgtcaaggcagcaataaaaaaccaatgcagcaaaagacaataacgtctgtttaaccacacagtcacggaacatctattaactagcaacttattaaatacagcttactgctgcaacatctttggtgtaattaaaacatcctccatgaatcagagtgagaattatacttaagtgtctgccaattgccatgataakagaaaagcttatgatctctctactaagtaccttaggaagacaagggcccaatgatatgagcagtgtggtggaaccccaaacatcttcccactttcatgcacacatatcattcattctcctttttcccaaggttcgctgttagtatagaggcacaatagatcatgattagctctgggcatgttcacagtttagctgcctgagcagattaatttgagagtccaggaaaagcttattaaacagattatgagaactagacaagacttttgagaccatctgtccaaaactttggttttaccagtaagcaaattcagacccagcatcactcagctggtaggtggtaaaactgagaagagaatccatgtattttgttttttcctagttctgtgttgttgcactgcataatgaattccagccagaaccacacattcagttcctgactagtccacaattagaatcaccatcaagtcaaacacaagtgaggcattacatccaggaggtcatagttagttgtgtgtgtgttccctagatagattccctgaagctttctcatcaacaccaagaagctgaaggggaaaatgaaagttccccttcagttcccctcaattcaagagtaattgagaccaacatcattcatggatattaataatatgaccttttttaaagaatcaccaaatcattacatcataaagaacaatgatcttatattttactaggtttattagttgcagtctcagcctctaggttgctagaaagctctgggctcctttggatatggacatggccaaatctctttaactttctagttatggcactttaggcaaattcaacttctctgagtctaggttttctcctctgttcaatggaactgacaattctatgtcagagagctattgtaaggattaaaggaactaatatttgcaaaccccatactgttgcttggaataaaacaggtgctgaataaatggtagctatttgattgttagttttaaaaaatcttgctagaaatcattaagagtgtatttatctaagtgggggaaaagaaaaacctaagtaagacccttggatcttgaaagaaagaaaaagagagaaatgattgtcaacacaaacagaaatgcttgaggaacttcaagggctcaagagtcaaaggacaggctagaaaaaaatgtcagagaagaaagagctaagagaagaaagtcaaaggaaaggagagaaggggagaatggaaggagaactgagaaaccagcagtgtttttttaaaggtgataactgaagaaggtgagcagaggaagaaagaacacagtgagtaattgaaatcaccagttattttcttctgattcatctcttaaaggaaataccttctaagagagatctttgctcttttgtgtgctggtgaatgtaaggtgagaatctctcctttctttttctaatgatgaccctgaacaaggccgtgctcttcttttaaacatctcttctgtttgaagctctgttacaatagaatcaaatagggtctccttggtttatgtcactgatctaaggttgaatgatgtacttgacagatccttttgaactgccccatctgggaactgaaccaaagactggatcgccagtcatggtactcacaattacctttccctttccgcacagtccccacattcactacccgaaagtataaaatccatctcataagatgcagatgaagtagaatgatgcggtttcccaaacttgcctgattatacaaaagcccagaagcattgctgtctggagattcggattcttacctcaaggtgattcttatcattagaaagtgaaaggtacagaaatgaagaaactttcgagtaagcaacgtttcctaccaagggactgggtggttctgaatataacaccatctttctcctaacaatagaaggtgacattttgacaaataagcttaggattcgtattcttccctaaggtatcattttgctgagctatcattttttttctttctttttatttttgagacagagtctcactctgtcacccaggctggagtgccgcggtgtgctcttggctcactgcaacctctgcctcccgggttcaagcaattttcgttcctcagcttccagagttgctgggattacaggggcccgccagagtttctggctaatttttgtatttttagtagagacggggtttcactatgttggccaggctggtctcaaactcctgacctcaagtgatgagcttaccttggcctcccaaagtgctgggattacaggcatgagccactgctcccggacttgctgtaagctatctttttgccactcatgatgatgattgtatggatgactctctggtctgtgttgtcagtattcaagtggtacctccactctgtcacatcttcattttgcttgtctagcagacttgctagtcccttctgtcttgttccatgtcaggcttggacatatgaattgcaatcacattgtgagacaattaattgtccaatatttctcaagactccctgtcctttagaaactattttgcattcatctttgagtcctcagtattttgcctagtaaacagggtttgtcaagtgaatatccaatatagactcaggaagatccacatggggagtgagaaaattgagcgaatcccaggaaaagaacaggaaatggaggtaaaagactcacgtaagtttacccttctatccaggcatgcctccagacaccagcttccacttccttatctgtctggaattggtgttgaattgatcttcgaggtcagtttgaggtttcttactctctatatgagtctctgatacttagaatgttattttgtgctcagattgccagaaatcatgaagaaatgaaaggggaaaaatggtggcaataatgatgactaacaatgttttattgtgtgacatgaagttaaacagtaataatttattgttatattgaatgctgcagcattaaactgctgcctccagtgttaaaagcaatgctcacaagacagatcttatgagaaactctatgtaacagcaaaggatcactgaaatattcagatacagaatttacaatagttgcattagggcttcctttgaattaattaatatttcctctgagatgactcctgccaagtggttttgcttcattcctgatttaattgctaggaaaatcagaattattccagaaagtgaggctatgaaggtttcattgtaggaaaatcttgtgtctgaagccgtgaggctggacaaagggaaatgagttgaatgctgttgtgaatgggcagaagtcagcaccagcaacttccattcatttcgaagtaagagttgataagagaattgactgttgaagtcaaatctccgtatattttcttatttccttctttgcatccatcttgcaaagcaaatttttaagagaaaacgagtgtttcattcttgatagtgaattgctctgcttcttcagcaggaggtgcaggagaaatcctatttgcatcctttccactgctcttaacaagcccctaaaggctgagttaatgtttatttgtggcctggagtggccaaaagggaatagcaggaattattttcttcatagaagtggtggagaatatgagtgcctccctctataaactggagaagatttacctgcacaattctcctctctgctttttagtactgcttgggggatgaaagggacccatggactttggcctcagacacaccaggctggtttcaaattttccttttttctgaaatccacagtaagccacttaaactctctaagccacagtattctgttctgtacaattggaataacaatgctgtgtactggaacagcttcataatttgtaggcccagtactaaatgaaaattgggacccttttgttcaaagaacatgaacttcaagacagtaatggcagagcatcaaataggtgtgtggcccttctgagcatgggggctgtaccactgggcaggccacataccacgaagttgacctcactgtgcagctggattggctgttggatgtcagatatctttccctttgtatctctgtatctcagagagtggatccctgaaaatggcatttgcactggctgctagctagatttagccatggaaggcagtagtaggagactgatggtgagaggcacggggaagccaagttatttccctcttttctcctttcccctgtctctatttccctttgaaacgtatctccaatagtaactgctctcctctttcagttccagcatacctaggacagcccaccttctggggtcccacctttcctgatcccactcactgctagtcagttctctgcaggcagcccagctcctcatgctctaaaaccaccatttccttggttcctccagcctgacaggtgctagctgcttcctgatataactaatatcttgactacctccctgttccctatgaggcatttcagctcttccaagcctctttaactagttccccttattaactattctttattcttcatagaatctgatataagtgtctaccttgaaaggttattacaaggaacaaatttgtctaaggcagtggttttaactgtacattgcaattcatttgtgagtaatacaatcagtttgatgggtcaagaccggtagtttagaacacaaaataacttagagcagaataagaaaacatggtagtgcattgtatgtattaaggtacatatgatttaataaagcttttagttgtctctgtgtgtatgtgtgatgtgtaccatttcatgctgtaaaaatgtattactttctagcaggtgggagaaggaaagaaaggccaatggtctaagacttctggtacataattagcactcaataaattgtagaaactattgttgccatccaagaccatgccatttaaacaaaaggcagtcagacagcccaaagagtttaccattccaactcactttagctcattagaatagtttcatgtagttgggccaacttgtactaaaatggccaaagcgtttacttacatttgtttgtttacacctagacaggcccagcttgagtcaccagccttggctgaaagagaagccagccaggttcaaagtaaagaaacagttttaaaataacattttatttttctgtgagtcatagcaaatctgtccctgcaacatctttctcctgcagctaaatgctttaaaatggtcaggtctcacccaggaaagtgggactgggaggaagtgatgcgataaaacagcttcccaatcagtgcattagtaggagtgcaacctctggcattcctcttttttcagaagtatcaaaaagctctgcagagataactgtgtctccagatggccatgagattggtaaatgacaaatgtttatcagcctttcagcacctgctgatggaagaactaaaaaaaaaatcgcaagtgactttatgagcccacagccaccccagctgtaatgggtgctagtagctctgtgttgctgacctcacatgggtaaaggaagagcagaagaatttttagtcccttggctacttcttatctatttcatcaggtaaggaaactcaacttgaatcctttcaactctgaagaatggtagatctgaggaacaacaaagagctataggtcatgtggatttctctgctcagtcagagagcccagaactctccctggagctgaagatagcccttgcaagctatctcatgatggttttatagcacagtgggctcactcatactggtgctggttttgagcatctatgttgacaagacaaatgtctgtttctactactgcagaggatagagtttaaccaaagtcaggtgacagagaaaaagaacagaaactgataacacttacacagtatccttatatagcaggctcttgaataatgcaggcattggggtgacaaccacccttacagtcaaaaatctgtttataacttttttttttttcagatggagtcttgctctgttgcccaggctggagtgcagtggcatgatcttcgctcactgcaacctttgcctcccgggttaaagagattctcctgcctcagcctcccaagtagctggaattacaggcatataccaccatgcctggctaaattttgtatttttagcagagatggagtttcatcacgttggccaggctgatctcaaactcctgacttcaggtgatccacccgcctcagcctccccagctgtgtagataacttttgacgccccacagccttaactattaatagcctatcattgactagaaatcttactgataacagtcttttaatgcatatgttatatatatacattacactatattattacaataaagttggaaaataaaatgttattaagaaaatcacaaaaaaagagaaaatatatttactattcattaagaagtggaaattgatcatcataaagtcttcctcgttgtcattgtcttcaggttgagtagctgaggaggaggaggaagggaatgggttagtcttgctgtctcaaggatggcaaaggcagaaggaaatccgcatgtaagtggacccacgcagttcaaacctgtgttgttcaagggtactttatgttgtccgggatgctatattgagtactttatacatataaatttacttaatcctcacaacatgcctacaaggtggatactactattgtcctcatttccagctgagaaaacagatagagaaggcaaataatgtgctcaaatctgcacagttaattaatcatagagcccaaattcaaacaaaatagtgtggctgccaagtcaatgctcttgacctctacccagactgggagccagagggtttgcattctaattttatcattaaccaatctgactgatggggcaaatcaaccctactgcaatctcctcttttcatctgtaatataaggttattgcttgagatattttcaagtcttagtgccacctcccatttagagctttagtgttgagaaagatgatattaatgtattccgttgtcctaaatatttcaaacacgtcagtttctacttttccagacaactccaatggggatatttttttattcctccacttcctaattaaggctgaaagggccccatattcagctgctgagtctctgtctcccgccttcttttcctcctgtacgacctaaaactgtcttttgtctttcagcacttggggagaaactctgggaagctttctaaatccctaaatttgtcacacccatccttaaagcagtgctgaattaaaaagtgggattcgtctaagcagaggagatacttaaggaaggagaggggctacagcactaaatgatgtttccaattaagagaagtgtaaggtcagagagaaactccctcctggatggagctcttcaccacctgatgagctgattaaatatcatgccgcaaaaagtaaatgtttactccaagccaggtgcttggactctaaagaactctattaggcaagagtaagtggtttaattggctcaccttcattcaactgttagtatgttcctcataagtgcctgtcagagagaatcttttgtgtttcccttctaacagctggctcataaaaacataaactcatcttacaatgttaartaaggatcttttaattcctgttttctttcctccaatttgtattaatatgataggagagaaagaaagtgaaagcatgcttctatagctggctacttcatcaaacttaatggaaccatattttgtaattcattctataatttaagttttggtcattttatctcttaaagatgaattccaggccaggtgcagtggtttgtgcctgtaatctcaacccttgagaagccgaggtaggatgattgttagagcccaggagtttgaaaccaaccaatatagagaccctgtctctacaaaaaaaaaaaaaaaaaaaaaaaagtcaggtgtgatggtatatgcctgtagtcctagctactcaggaggctgaagtgggaggattgcttgagcccaggaggtccaggttgcagagagccatgatgatgccattgcactccagcctaggcaacagagcgagacactgtctcaaaagacacacaaacaaaaaaatatgaaaccctagctaaacactgtggactcaaaatamcctgtgaaatcacccaaccgtagtatttatctatgagaatgtttcaaagggagatatgtagttgtatgactatttcacgcagatatttgttattaataaaagactttgtggtcagcatgacgtgttagctacagttgaatccatgcttctttacattttgtggtttggttgttgtcgaatttactttccatgcattatttccaaatatatacttattatttcatcagcttagaatggtttggatagaaaaatatatcaaggtctcagaaatgccccccattaacataagggtagccatgacttgaacccaccccactggtttcctttgtctttctccatttctgattctctttctctgtggttacctaggatatataaattacttgactttgaaattcatgattaactcagaaagttatagctagtgattcacaatatttgttttaaaaacagtatgaagaatgtagaagcttggtttttaattataataatataaattagtatcattttatgtactcaaatgccacacacatatgtataaggcattcctatggaataatcttaacctggttctttgacaatttttgtaattcattctctagtgaaatatttccccaaagtgtatccacagattactatctcaccaatatgcttccggaaaaaaagtgccatggtctaataagtttaggaaaccttgcacattctttttccttgggatcaatcattagtattagcagatttagcactaagaaatcctgtagtagagaaattcatttacttttaattcagtatttctcaaaatcattttaccctattactcaaatccctgcttttattctgggaattgttacctctcctttcctttgcatacacttgagaaattgactctagaaatactagccttatgaaatattgatagtaattgctatggtttgttagactcctccaaatctcttgttgaactttgatccctagcattggaggtgggcttaatgggaggtgtttgggtcatgagggcagatccttcatgaatacattaatgccctccctggggtgggtaggaactgagtgacttgttgctctattagtttctgtgagagttgtcccccgactcgccgcagagctggttgttaaaaagagcctggttcctcttccccctctctctcttgcttcctctctctccatgtgatctctgcacacaccagctccccttcaccttctaccatgagtgcaaacagcctgaggccctcacagatgcagatgccagatcattgcttcttacacattgtgtagaaccatgagccaaataaacgtcttttctttataagtaactgagcctcaggtattcttttatagcaatacaaatggacgaagacagtactgattatttgttgggcatttcctatgtgcgaggaactgttacaggtattttggcagttgtaatagcgaggtatttattttggtgctttaacagagactaaaatggctgctttaaataagattgattatttctctctcacatgaaagcctaaaatggtgagcagtgtagcaacttagggcagcaatctttgggtcatccaaggcatcagataccttctgtggtgttgtttcaccgtcctttgaagtgttcctttcttcataggttgaaaccagctccttgtacctcatctggtcccatccctaagaaaagagaccaaagagccatccttgagaaaagagaccaaagagacatccctgagaaaagagaaaataaagggcaaacagcttcttgttaagaatctggtctggattatgctcatagctcattgtccaactgaataaattgctcaatttattgagctcataaattgctcaatatgacatggccatacccagcttacaaggaagtccaagaaatagtctcttattggggaacatttgctctcctgaaacatagaaggttctattatttaataggtagaaggaaagaatgagtattacaaggcaattagctttctctgctgtgtttttacctcattaaatcctacctacaacccatgaaatcagtactttgtcttcattttaatatgagaaaactaagatacagagaaagtaaaactaaagtcacgtagcgactattcgcttttggttttgataccatgctacctaattccatagcctgggttcttagctgatacacacagttgcaatgcctttccagaaaatttctagtagtttccaccattcctggacctattcttttctaactttaaaggcaatccatcttctaagtcagtgtggcagagactctagtttcttcacccaaaccatgttctcctgtctttcttgggctcatgtttaaactatatttctcatcttctcttaggtattaccatatgactaaggtctagtaaatgcaatgtgagaagatctgttgtataccacctccaggcttggcctgtaaaaacttcccatggacatgagctcctccatgccctttcccctccagctagatgaattggaaatgacacccaggacaactggaaggccatatgtcaaaatggacaaggcttgctcaccctgaattctagaataattttgtggaggagaactaccctaacaatctgttttcccacctagcaaaaaaaaatgtgaccacaaaaataaacttctgctgtgtttgatccatttgaaagtttttgatctattagttctagcagttagcttcctctaaaaaatacaattgattaccatgatgtcatggataacaagttggcaacctgggtcaaagtcctattcttgtttttttctagtgataagaccttgggcaatttattaaatctctccaagtctcagttttctcagctttaaaataatcttcaatcatagtgttgttctaagaagtaaattagtttatcttaaaaatcctattccctgttaattattccattctagcaatcaatttgtgcttattctagttgtcccactgtttaaaacacacatgccttagtattatgaaaacatttcaaaagaaatatgtcttagatttctacatttatattagaaaactttcaaatttatacttcatgccttttaaaaaaataatactagtaaaatgaaagaatatcagttttggaatcattccacagtcctggataaaaatacctgttagaccacttactagtggtatcatctatgtgagactcaaattcagcatcagtaattttggaagaatggtagtcctactttcagaattgttaggattaaataaagtgctaaaagtctgtgaaatctccttgcacactgatgatttcccttctctccccaaatagatttccatatggagcacttttagtcatttttgctggactgcaatcacctttctttcttcaaatgttaaaactgaacagtagtagctagcaatttggaatctctagaaagaagttttttttattattatagtgctgaagctcagctcattctctcaaggagcctatggatttggagtgcatcataagggaagaagttaacctcctgctgtattaccagagaccaaggacaaatgttggttgtcacctgcctaaccaggcaagtgatagtcacagactgtccatctcacaacaaaacaatgctaattttgttgagggatagaaatgttgtagttgatctcattttctctagcacagtgtccctttttgaatgttccttctcaaatagggcatggtataaactctgcaagaggggagttccatttggaagacatgtaggcaaacaacattcaggctccacacccacttcgcctgctgagatttgacttattacacaactgcagatgctggtcaattagtttctcatactcattcgtatcacagaagggatgcagtggttataaattgcactgattatgcacaccttggcttaccctattgttgcataaaaataggcaaggcatgttagtcattgcatagtcttttcagtagaaaggaaaagtgattgagaaacagcaaggaaaattgtgtttacagctaaggtttttgttttgttttgttttgtttccactccgttcagtgtgtatataaagttaatgcatttttaacttaacagcaaccaacaacagcttcactttgagtgcatgaaaaacactggggcttaagtgttgatttgttgccaggcatttcctttgggaatccatgtaggctgatcatttacctgggaaatcgtgtgtgtgtgtgtgtgtgtgtgtgttacctttacctttgtaagggacatcataaaacctcaatttcctggtgtgttccagttaattttctgctttattgaatgtcactctgaattccctatttcctttaacttttgtgttgaaaaatcattcaaaagactactgagccattttcttcttcattaagaaaaatattgggttagacttaattcttgatagctgaaaattttggagcattgttttgtttgtttgttttacatttttgaaacaaactattttgagaccgtaataagaacaatggataatcttcccagaaatcagagagagaaagagagagaattctgcataaatttatagatccttgcagcccacatttgaggccccagcaatagaccccaggttaagaattcctgccatagagtgttttgacattatcattctaaatatttaattttgtccaaataaaaatatagacagagaaaagggaacttagcaaaaatcttcatttacattcaaaacaattcaaggtgcattaaaatcatgaaaaactttgttcctctataggccagggaagtttcttgctacttatttcctttattaaagtatattttattgatttgtctttttcttttaaaaacagaatatccaatgggtaagactgaccaaagatttggggaagttgattctaaataggtgagctgtgttttaagagttcttcttagtactcttcaactcagcatgtggaaataaatttcaaaagcttttcttaatttcacaaaaacaaatataaatagttatggggggaaataaacaacaggccaaataccagatggcaactcaaagcacattgtctgctctcttgctctaagctactggttctcagtaggggtgggacagctcccaaaagggggtctttgggaatttgtggtgggtttttggtagtcacaatgttaagaggtactataatagctatttagatggcagagttaggatttcctgtttctttttctttttggtatccctcatgactatatagtctccccaatatattcacatgggtgaaaatcctattcgtaatgattgaactcaattataactccatttacagataaacatgcacaaaattttcatggttttaatacactgaattttccaagggtgtgtgaaattgctgtacatattgacagaagattgttgtttgatttggttaagaactttttattattattattattattattatactttaagttttagggtacatgtgcacaatgtgcaggttacttacatatgtatacatgtgccatgctggtgtgctgcacccattaactcgtcatttagcattaggtatatctcccaatgctatccctccccgctccccccaccccacaacagtccccagagtgtgatgttccccttcctgtgtccatgtgttctcattgttcaattcccacctgtgagtgagaacacacggtgtttggttttttgtctttgcgatagtttactgagaatgatgatttccattttcatccatgtccctacaaaggacataaggaaatgtggcacatatacaccatggaatactatgcagccgtaaaaaatgaagaacttttttaagagttatttttcactttagaaaatcagctagagaccacaatgctgtttatggtattgaagtccccatgagaatgcacctggatcagtgtacatttgtaatgatcagattcacagtgattccatgtgtaggtataagcttttctctacttcaccatgtgtccttgtatagttattgataggggttggctgtggccccctcccaaatctcatcttgaactgtagctctcataattcccatttgtcatgggagggacccaatgggaagtaattgaatcatgggagcaggtctttcccctgctgttctcatgatagtaagtctcatgagatctgatgattttataaaggggagttcccctacacaagttctctcttgcctgccaccatgtaagatgtgactttgctcctcatttgccttctgccatgaatttgaggcctccccagccatgtagaactgtgagtcaattaaacctctttcctttataaattacccagtcttgggtatgtcttcattagcagcgtgagaacagactataacagttatcctgcatcttaacatatttcaatattatttattatatacttatatataataatataaaaatattcattgtgcatttatatatcataatatatatattatgtaatttttcattctgtcttataatttattctaaaaattatatttttaagttaatttataacttattaagtcagtgtttctttaggaaatgtgccctccgtcaaaattttattctttttggtctctttgctagtatgctactagctaaagaaaattcattcccactaattctggattcttatagttattcacagccatgctgttaaagagacaagtgaattactaccttctcagagttgaactcaagggggaagtttgactattggctggcaaaataaagtagtggaaatttatttcttttgttctcaataaaataacctgtgaaccatcctaaaactaaaaaaaggaaattatttatgaagagaagttgtatcatttaaattcgttttctctcttttccctttatttcagaaaccttccataataaaaacttggatataatgaaattttgcataaatgacatgtgacaacctaatttagtggaagccagggaacctgctaatactttaacttcaaagctcttccattttattccttcattacttttcctcctttcaaagcattctttagccatgcaccaagttcgaacaatgacgaatcaaatcctcagagccaagaacaatgttctaatatttccatgcaattaattgctacttcttggtgagcatccagtatacttgattctctcatagaagattctccaagcctgacactcggttgaagtctgaggacttcactgaggacaaagagggatcaaatcttcccaacaaacagtgaactcaccatgcaaagtgaatagaatcccctaatcaataaatcactaaatatttatggagccccgaaatcatattgtgacaagatttttcaaaaaaaaatgtagaaactaagttatgatacaatcacatgtcaggaaggtatattggagtactacttgtccaggactccactgacacccccttgtgctccctatgtcattttgatgtaccaggccattcactgtatctataacgtgaatttttgcccctattttcaatgtcccccatcctattagcttttcctttccagtaaacttctccaaacccttcctcagtgtttcaaaggcaacaaaagttatcacaacaaaagtaactagtatttcttgagtgttcacagtgggctggacaagcaaagtgctttacctgcattgcctcagttaattctcttaataacctatgacatcagctctattattaacctcattatacacatgggaaaatagacactactatgggctgaatatgccccctccaaaattatgttgaaactaaatccccattttgcagtattaagaggcagggcctttttgagtggccagccttcatgagtggattagggccttatgaaggggctggagaaaactaacttaggccctttttgcctttctatcttccaacatgtgaggacatagcatttgcaccttctaccatgtgagaacacagcaagaaggccctcaccagacaccaaatgtgctggtgccttgatctttgacttcttagtctcagaactgtgagaagtaaatgtatattatttgtagttacccagtctatggtattgtgttatagcaacatgaagccagacagaaaaatttacagttttcatcacttggcagaggtcacataacaggtcgatttgattctcaagccgtctttactattatgcttacttggcttttatctctgtagactttaattgctgagttatctttccctgagtcattgctgcttcaaatctcagtctttaggaatcacttctgtaatctgctgattaattatgcatagatcataaaagttatttaatccagctgctgtccagagtcaatatcactatcctactcaaaaatctgcaacaatctaccacgaaaaatcaattctaaactccttagtctgacattaaacagcctgataatctgatccaatccagcctctctgcttctacctatcttgtttacctgtttgttgattcttattcaattgcttccttgatggaggactttcccacccactccatcactacctcttgtttctgcctgcacacatcatttccccaagtcttttgataagaaagatctcctttttacaactatttctctgctctctcctctccaacatatcttcctgacatgtgattgtatcataacttagtttctacatttttttgaaaaaccttgtcacaatatgattttggggctccataaatattttgtgatttattgagtaggggattctattcagtttgcatgtggagttcactgtttgttgggaagatgtgatccctcttttctctatgcttccatcatgacctggatatacttctagtatggccctttctaattcttcacatgcatgccttcactggactgcagactccaagacaggggccatgcagtattcatctttgtgtctttccagttactccacaacaatttattgagtgaataaagaaaatgctgagaaacgaactcaagaggttttgtagatttaataccattgctctgggtatcgcaaaagataatggctattaatgaattagtaccccacttcccaccacctcaccctgttgacatagtatgatagaatgtgtaaccacttaatctaccttaagatgctattgggcaacaacaatgtcttgactttaggggctggaaagcaaatagtatataatgtccaattgctcttgtttggggcagagagcacagatttaagaaacaaggatacaataaaatgaaatttggctgcagtacaaggttaatgtctctcctcacctcccaaagagtaccaagggatcattcattgtcacagctgttggggtttagagctctcttctcatccaaatgccagtactttccacaaaaagctcttccccagggatgccctaataagccagtgtgtcctgtataggtgagacttgccctggctgtctctatccaagtggtgacataagctcatctaaagcctttcattaatgcaaacaatgacccagcccatggtggcactgattcttgaagctgaagacttggagaaggagcctgattttccatcacactgattgttgttttcagtaagatgtttagcttttcaattttctctctgccaaatacaaattagtgtatttccaacatcccagagtcttagctgtgcattgccagcttccactgcttctccttaattaacaaacagctgtagaagagcttctcaactgacatggggggaagagctctaaggaagatatggactatgtctcatatcttcaaatcctccacagtcatctcctgttagatcaccaagaagaaatgcccagtggagacacttcagttcaatgaaaagtttatgactagttgggtttggtctccattttgtattaatgtagttgggttcagtctccaatctgtatgtatgtagtttcctatcccagagagcaggacaagaccatataagctctatttatgtttcctttgactctttagctgaaagcctaggatgtaggacaagtggctaacctgttttagaactttcttcctasgctaacattctgaacttggccttgtggattttacctcttaaactgcaccaaaaaccatggaaacaaagggcttacagcagtgttagcctaatctgagccctctataccttcctatactgtggccacagcagtaaagctacgtggtcttgcaaaagaccttccaagagaaggttggctacagaccttgcttatcacaccatgaacctgaggaggaaagaaaatactcacaaatagtttagcccctttcataaattgttggtccttaatccatttttgaaccctactctgttgggtggaatgtgtgtgtatctgcacgtgtgtgtgtgtgtgtgtgtgtgtgtgtgtttagaaattcaaaaaaaatgaggagatcttggtcttccatagagggaagactgcattatcaatagagtctttcttagcagaggatgaaggctcctgtagctcctaatcttcccatttgtgcacaaatacstgaattctgattaggttgaaatcaggaagacactcttttgctgcttagtggccacatctagagctaacaacattatcagtgggatggtgattcatggtttaagaacataccctcgccattccagctactcgggaagctgaggtaaaaggatcgcttgagcccagagtttaaggctgtagtgtgccatggtaacacataactagccactgtactctagcctgagcaacatagttagaccccatttcttaaaaacaaaacaaaaacatccttctcctcttctcctcccccagcaattctggatggctcatctaataaagtacatatattttacctaatctagtcaaatgtaatgacacaataagattattattattctccaatccctgctctgcaacatatttggctgaacatttttggctgcaacatttttggctgaagagaatgaggtttcttcctccctgaacctgggaactaacatgaggtgttttcttccacttggtggagctgtgcacatgtgtgcttgcggagaaaaagaagagtcccagcaggccctctactccagctgttggagattgagctttccagtgcattatcctggctttatgcagtgatgccttccccctgatggcagtaaaattttaattagagggcaatgtgcattcctatataatggagtgcacacatggcaggaagttaacaggacacgtttgcagttccagtttcattgtcaaccagctgtgtgattcctggcaatttgctttattttgttgtgtcacagttcttgactaggtaaactggagagtcatctctggtctactttcctcttcagtttggtggaagtttcacgtaaaattacatgtgaaagtccttgagaattgaaacaatgggcaaatctatagcagaatgcttgttgaattctatcagctttcccaaggtgcaggctgcccatgtttagtctttctcactttccaatccattttccacactgcagccagcgtgttttttctcaatggaaatctgatcatatcaacctcttttttaaaaaaaatcctaaatatcttctccctctcacagaataaaaatcacaattccttaagaaactgtcaaagccttctcaatctgtgcctttcatctctgaccattggtatctttcttctgataggataaaagttcattgaatgttcaagccttctcttttgcttttcagagcttggccatgtggttttctctgtctgaaacaagcttcccccattcctttctaggctaactcctactcatcctccaaatttcagcacaaagtcacttacagtgggaatgcttccatggccctctattagcagcctctgatttatgctcccacaatagtcggttctgcctctggaccatgttttatcctattgtttttcctccataagagcacagtcataatctgtataactcagtgttgtaactctggcagctagcacaatctcaggttcataaaaagagctcaagaaatatttgttgaatgaccaattagatggcatattcatttcctagggctcctataactaacgctagcgtggtgccttagaacaacagaaatttatcctgtcgtacttctagagggtgggggtctgaaatcaaggtgttgtcagggctgtgcttcctctcagattctacacagaatcttcccttgcttctttggtggcgatcagtcctttgcatgctgtggcttgctgctacatcactctaatctctgcctttgttgtcatatagcattcctcctgcatgtctctctttgcacatggcattttcctcttataaggaaaccaatcacattggattagagcctatcctaatggcctcatcttaacttgattacatctgcaaagactctatttccaaataacgctacattcacagatactggaggttaggactttaacatatcttttggaggaggatacaggtcaataacagattgctaaaccaattaactaattactaattaatataaattatgggtggaaaaagcttccccagatcacgataaaaagctgtgtcgatctaatcaacgtgcttgcttaaataaggcatgtgtataatatatatgcatgcatctgtgtatatatacatatgtacacatgcattaattatgttgtgcaaaaaccccaaaggctatttatcccaaatagaaaatattgtgtcgtttgtctaaagcactttaaagacatctgcctttttcatatgtaaatttcttggatgacaagaaattactgctttgctagcttttaaaacactaaattatgataatccatcaccaaataaactataagcttctatcatttaaaaaatgtaagaactctgaggttagtagtagtttttagttgccattgaaagacggcagtttaacgtcatcgtttattcagatttccaaattaaggagatctctgtggttagacattcctttcgttatcactctccttttcttcaggcctgtcatttgtccattgatgtcttttccttccaaatgattcatgtacacattaggtcttttccctaagcctcatattatgaaaagcaaagctacatgaaaaaaagcaaatgattgctaaattatgtcctaatttctagcattcagcagtgctaaaatgaagcagagaatttcacaaaattctcagataaagtatatttttaccaactaacattgggtaaaagggactgagatagagatttatttttattattattaataactttgaaaatggtgcatttgggaaactacttactaatgttcattggaattggtggtaatactgaggtcaggatttaattccaggcattacccaaaaagtccatgtttgccttgtttcaagcctagagttcttaaaacaatccctgcaaggaaccaggcataaattatctttcagattggtgggcgtaggaatctatactgcgagctaactgtgctgaaatagacattttagaggatgtgaatgtctatctcagacaaaggagattacaggttattaaccaaggcacttttcaaatgccatccctttgggctttcttacttagagtttcagattcatttagccaaataccagccttatcccttccctaattttcctaaatatttgtggctgaatatacttttagctttaggagtgcagaagactttgagggaaagaaggcagggttgaaaaaggatgagtttcaggtcattacattgcttcaaggcagtttgcagcttgcattcatatttttaaagtctaaattagagccctttaacaccaactatcttgggcacacatgtatgtagaagcataccaccatatggcaaaaggcagagttgctaaaactataaataacaaagaggaaggttaattagcaaattaattagctgaattctatacaaggtactaacaataccttaatttccagatacatttgttatcaaaaatgtctaccttaataaagctgtggggacttactaagtgtatttgctgggcatggttcccagttatgaaatattaataccttgaaaaataaaacatgcttatgaaaatgcagttatgctctcattttcagaggaatatgtaagtgaggaataatatagaaatcctaaaacaactggaaattcagactaaaatgaagtagactgtagttttgtcattgcatgttctgctcatactaaagcacctatcctcccactttaccttctttaaactgcagggcagagagttatatttttcatcttcatgttgagtagagaatccatgaaaatctaatacccagttatcactcaagtgtgacaaatagaaaggagcttcagaataggatcttcagttctaccaaatgtctctgcctaattacatcaatatccatgttgatgagtgtacaaacctgtggctaattatattttcacttcttctaagggtaggtacactaatgtgtgatcccacagaaaagggcatgaaagtaaattaaaggtgtgtgccatgtatattaatgcctttgtggttattattgctattgtcttactcccatggatattggaggattgttgataagacacttaaatgttgataaggcacctaatgagtatcctgtgtgataggagtagtacacaatgataatcatttccttctttgtgcattagtattgacatagccactaatcaggaactgtaaactctaaacttgtatctgcagccctcttattaaaaagattcctggatttttttccctaagctagaaacagacagacaaacaaaaacaatgattaaagggcactaaaagatatatttaaaggcagaggtttttttcctatgtgtataagattcaaattaaattcctctttttggctatttggacagttttggcaattgggctgaagccactatgtttttgtcataacaggtcaaggattgcttactcatgtttgagaagcaataatgatatggcaagagagaggtaagggactacaatgggaggcttattaggaattgtgcatgcctctttcatgtgtgttgtctccaagctaaccttgtgaggtacgaattatgacttcttcctgaaggagaaaagcaagttttagattaagtgcctgacattctgatgtcataaaaagactgaaataagcaacattttagcacaacatttgaacagcccttttcttaaggataagctctttgctctacaccatactaatttccaaaaaggtgtgagattgacatatgaaacttgtacgtttatataaatgtgaatgcagcaagccagagaacagaatgttctgtagcccaggcaagaggcagaggaaatacccagtgacagatctacttggccctcgactaaaggggcgctgtaactttaaaatactaataaatatttagcttggctttttctttcctatttgctaagtcctgtcttgattctctggctaaggggtgtaagaaagtggctgtttgtgataaatagttgtgtttgtgtgtgaatgcatggaagaacacatctgagataatatagtgtttactgctttgccattagcacaatgggctgtctttacagaatatgatgtttaaatctatgcaccagtgcactttcaaatagagaattcgcttcctgttttcacttaaaactctctttttattttaattaacgaaaaagcagtttaatcatccatctttgcagctaaggaagttttacaggcttataatactgtcagattctgcggtatataaatgagaaatagacacttttggggaagaaattggccagtcttccttccttccttcctttcttcctttcttctttccttcccactcctcccccctttccccccactctctctctctttcttcctatgaagagactgttctaaaagctaggaagtttcattgatggtgtgtgatttcacaagctggattttatttcagaacacctgtcaaattcagagctgtctgaagcttctccaacatcattaccccagggctcccagttctatgcacatgtttttataatggcaggaaaaagaattcatatacgcatttgtgtgttagaatcagtggtgtgctggtgtaacaatcagctcctaragggtgaggcagggtgggtaggggatgtttagaaaaagtgggtatggagaagtccctgaattctagtttttgccaaattctgtgatgcaaatactcccaccacagccaatttcaaggttatttttcccagttacatttaatcagggccatacaagatgttacaagaaagaaaatgacaggaacccatgtggttcaactgatactcactcaggagctgagatagcatttcatttatgcaattcaaatagctattggtttggataccttagtattgtttcttccaagaaatattttcattctttcctaaagggataataatagacattcatgacctaatttaggagataatcattttttattttatcactcattattaatgcttcatacgaaaactagatttatgaaaaggcccatggattttacatctattatatcatctcctgttggtttgagaatgaaatgtttgttttgctaatatgtttttctgattaagaagtggaggcagcaggctattaaaagtttttctcaaggcagtaaattggtagactagatatcttcaaattaaaaagtagtgatttcttaggcctgttcatagattattcaaaaatgggttaaagcacaggttgaaaatacttttatgggccacaggataatttaagtgattatttttcagccacttttttttggaaaacatatattagctaatgtctgtaactttattaacttaaaaacaaaagtccagataaaagaattttacactctgccaagcagtggtgcccagcttataggtggttggttctgcatcttacattttgttacttgtaaggtctatgaagaaaggactcccttttctgccctgctcactgtcaaaatttcagtctctacagcatgaagactctacatatagaagacactaaaattttttttaaatatatgaatgaagcagttaatttaaggcagcaaagtcacgcctatacattatttctgtaatgtttaattttaagtataattgcttattaagtagataggatgcttagaaactatatttacctggaagtggcttaaaaatttccctatagacaaaaaatataatttgaagtagttcgtcttcaaaataaaggcctccagatggccagatacctttcatgtacatgcatcaattagactgtaccagaagataataaaaagaatcctattgttttaattatctcttttattctccaaggaacccctattcctgccaattcttacagacgttattaaggcattcagttagtttttcattcatttatttaaaaaatatttatcatgccaagtactatttaaatggtggagataccaaagtgaatgagatacatacaaggggccctagttctcaaggagctcacattcatgagaaattaagttcacacatgcaagatataccagatattaataagtattactcagatcattaaactagaatgaggccaggcacagtggctcatggctgtaatcctagtgccttttagaggctaaggtgggaggatagcttgagcccaggagttccaggatacagtgagctatgatcactccactgcactccagcctgggtgatagagtgagaccctgtctctaaagaaacaaacaaacaaaaagtagaaagatttgacctgagaataactagatagctattttagatcaggtattcatgaataaaataacacttaaagtgagatctgaatgacagaaagaaaagccatgcaaaaatcaaggagtagggtgtgcagatttcacagatggcaaatacctaacatggtgatgctaaagtcagcatgaacctccttctgtttcttgaacagaccacaggctggagaagaaaaggtaggaagaaggctggtataagatgagggtgaagagagaaccaaggccagatcatgggagctttatagccaggctaaggtgtttatgtttaattctaaatatagcagaatacattggagaagactatgctgaggaataatgtgacttgacttaaatttttaaaagactacctaactgtgtatggaaaatgaattgcatgggacaaggatggaaactagttgggagatgagttagaagattattataggagtccttgtgggaagtgttggtgactgttggagggtagtggtggtagtgaagatgcataggagtttctgagcttgttttggaggtagaggaggcaagatttgttaaagaactggcttagcagggtgggcacaaaggaaatacagaattaaaggataattccaaaggttccaacctgagcaactaagtagaggctggcatttactaagatgggtgagattgagagaaggggagtatcaggaggcaagattacttgttattttttagccatgtttacatttttttgagatatcttctgagtatctgagaagaaatttcaagtgggcaatttgttggacaagtttttggttcatgggagaaattaggacatggatgcaattttgtgagcctgtaacacacagctagtatttagagctaagggtctatatgaaatcacctaaatagtacttatagatatgaaagagaaggacagagcccaggggtactcttacatttacaggtgagcataaaaaagaaatcaaaagaaactctaaaggatcaaaagcaaagtagaagaaaaccaaacagccatgcgggagtgattgttgagatgttttgaaaaagagaaggttgacagtcatttaggaaggtgaggaatcaaacacagtgcagatgagggtggtgtagggagatcattctctaggtgccctttgcatttttgctcatcttacgatcagagtcactaactctcttggttcaggagttggaagatacagtggcctgttccagagcaaaggcaggttcagttgctgttcaggataatgaagataatgcctcccactgaggcaaagatcaacagagcttactgcccattataaaatattcagattccttaagcgcatggttcctctcctataatacaaacctcttgcaggtactgttgtcacctggcccttttcatatcaccctgtgaggagtggggcccagagaacctacacaaatgcaaacacttcaaccactgctattgtcataaagtccgtggtctctgacccaaagtctcatgtcccctgctagcatccatgaaacagtggcaggtgaactttgaaaacaggataggctaaaatctcagatccttcactactcttcacagatagtaggccattgtgatggtctacttgagctctgttgttgtggtggcatatctttctgtaccgatattcagttggtttgatgcaagcatggtacaggtagatgggtttatgccttagatatttaataagaatgccttaacacatgatcatatgtcttctttcttcactgacaatggcaccccactaatggagtgtgcaaatccaggaagaccagtgtttgaacgttgtggggtaaagtgccgataggtaagcccgcatatttagatatttctaagaggttctaaaatgatgaatactttcctcaatcatttgtcacaaccaaagtctatattcttatgcttagatgtcataattcatattaaagaattgggccttatataacaccttaatattaatagtacttggctaagcacagacgatcaacaacacttaattaatgaaactagttctgaatacattatatactttcagggtatataaggaggtaattacattttacagaggcatatactctatatctggtttattcgattgtgaatcaataaacatgggggttttttttaaaacatgatttctatgatgaatttttaatttaattgtaggaagctcctttaccgctgagtcaccagtgtcttcttgtataatataaagacattatggcctggcatggtggctcatgcctgtagtcccagcactttgggaggccgaggcgggtggatcatttgaggtcacgagttcaagaccagcctggccaacatggcgaaaccctgtctctactaaaaatacaaaaattaggcctggtggtgcatgcctgtagtcctagctacttgggaggttgaggcaggagaattgcttgaacccgagaggccaaggttgcaatgagccgagattgcaccactgtactctagcctgggagacagagtgagaccccatctcaaaagaaaaaaaataaaataaaagacattagccatctggagcagttaagtatatatttttctataaagcaatttaatgtagatgatattttctctctgtgtgtgcacaattgcatgcatatgtcaagtgtcgtgagattccaagtatttgacgatctgcttcttctatagacagttgggtacataaaaggagagccatgtgcaaatccagtctctggttctaggtttatacctcctcttctccacctccgctttccttgataacccctgatgcacacagccagccatcctcatccctcgagatgtggttgatttctctctatttgggtttcaggaaattgtttttcctcccttctgagagtctatgcgctgctgcaggccagtcagtattgattcaattctgggtgaatcctctctcactctttcctaagtgtatattgtatatgtagttcttctgccaaaagcagctttgtattaagattgtattaagatttaagttttcttaaatttgcaagtcacctaaaatatatcctgtgtctgctgggatccttttgatgttgaagcgtcttggagtagacaatagaggattttcatatggtggaagaatgttaggtgtccttgttggagaagagaggaagagtagagaacccctttaaagccctcttactgcctgttccttgcatctcatctctacatatttagcaatcacatctgctgatttggcaaacactaacagcagctacacagcgtcagtgaggacaatagtgagtggatttaaacatcaggggcgatgtaccagtgcaataaatagaatatatcattgtttcactgcggacagaatgtctgtgctctctatgaggatctgcatttaagcccaacacccaaggaaggcaaacatctaaagctcagcatggggtccttcaagcaggggaatacaaacaaagcatttttctcccaaaacacaagttttaggatttcatgtcaaagacatgctgccaatcagaagacagcattcccccttcttagagctggaaatggtaaccaggacacattggtatgcacaattctgctggctcagagcacacgcaagctcctaggctgtgactggcaggaggctcacagcgatttctttttttttgagacagggtctcactctgtcgcccagactggagtgcgcagtggtgcagtcttggctcactgcaacctcagcttcccaggttcaagcaattattctgcctcagcctcccaagtagctgagtttataggcgcccaccaccaagcgcagctaactttcttgtattttttttagtagaaacagggtttcaccatattggccaggctgttttcaatgtttttgaactcctgacctcaagtgatccacccacctcggcctccctaggattataggcatgagccaccatgcccagcaagctcacagcaatttttaatgcaatatgatcagacctaattttggctttttgatttcctcccttaaacctcaggcaggcactttttcaaaagagaaatcaatcagtcaatcaatcagtcaatcaacagtgagtgaatgaatgactaaattgtttgtttttagcatggcataaaataatccttaatattttgacctcaagcaaccattctgaccatatcttcttccatgcgcctttgactgagtacccagatacatgcagagtcaagttttctagatcacagccttgtcctctaattcagtgccttggtatgaaatctttcttcttctatgtcctttttttgccagatgaaatttcagtctttattcaagatcaagtgcaactgtctctttgaggaaagtcctttgaccgccatttctccccttcagaaggcaaacacctgggggagaagatctgcttaaggacctggtaactgacaaagaatggaatgggagcgagaaccgcctagccatcccttctccttgcacagtcatgaaacaaaagttgaaaaggagcctggttttacttgaccagtcataaattaccataaaataaaatgagatattaggaacctttgatctctgaaaaagtaatatgtgttgaaaagaaatatcactgttacatatagacaaataatagaaatatttgaggcatgcatttaaaatgtagaggccacttatagcaggcatattaacatgtgcatttgctttttaagaagtatacacacgtgtacctttagctttgaaagggtaagattcaatgcttgggtgatggatgcactaaagtctcagaagccaccactaaaggacttacccacgtaaccgaaaacaacctgtactccaaaatcaatgaaataaaataaaaaggtaagattcataaatagcaagttgagaatgcatgtttataccatgtagacaatgcatgataaattgttggcaataagacccatgtagctgactttggggatacaaagtagcttctgaaagaggttcctaattagccctgcctgaggtgactgcttaaggtatttatctgtagctggaatgcattgcctcagagacttgaggattcaggagctatgagtttcaaggccacagatgcagtggaatagtaaggcttcttcccctgcctggcacattgacctaactgatgagaggtgccttagggacccagcagctatggccatttatgtctagtccctcactctagaaaggaattgcttgaataccacggtgctggagtttgtagccacaatgctgaaggtcagggcagtccttcatgatgatgcatttctgtcagccatacttgcacatctctttaatgtctgcaatgtcattaagcagtggtgtatcatttttttttaatgcagaaactaaactgatactcaaaacctatgacaatttgaatccttcctgcctatccaaccttagtttttctgctcgataatataaattctccctttcagtcaggtagatagtcttcctgtcttcctgtcattcttggtttctctttgttgctcttgtcttccccacctgctgaaatgcttttcttctttctttcttttttttttttctgagaaaagacctcactctgttgcccatcctggagtgcagtggcataatgacaactcaatgcagtctcaagctcctgggtcaagtgatcatccttcctcagcctactgagtagctgggactacaggcatgtgccaccacatctggctaatttcttcatttttttgtagagactgggtcttgctatgctgcccaagctggtcttgaactcctgggctcaagtgatcttcccacttcagcctccaaaagtgcagggattacagacatgagccacccatgtacctggtttctctcttcttttctaactaatcaagtactttaagtcacaactcagggtgacaacctccacctccattgacttctccagagcatttcatttcctcttatcctttctctgcactttgttagaacttacattctgatttgtactgttgacctttgagcccttaagtttatgcaccttctctctctctctctctcgctcactctctctctctctgtctctgtgtctctctctgtttctgtctctctctttttctctgtcaattattttattctggtatttggtacttatgagaaatcttattagtatcctaaactctctcaaaacaggaaatgtgtattttccttctcatctaattcttaggaaacttcatataggaataaaaaatatgtagtagtggattgtctggtaaatgaataaaagagggatttgaggtcagtgggctgtttcaggacatgaccaaggaatgtggtaccagggcagcaacaagcttgctaaggggcgataaagtagtcattgtatataacagaggaatttgggctcaatgcagatttgccactaactctttggcagtatagaattcactagagaaatattagtaggttagttagtattcctaataaagaactgctaataccttatagagacataagccatgtttctcgtctttcgtttctgaaatgaaattttggccagggaaacattttgcatccctttttgatgtctacaaatgtggcatttgtcagatgtgagatagttaagtgtgtgtgtgtgtgtgtgtgtgtgtatatatatactttatatatgtatatatacatatcctatgtgtgtgggtatatatatatatatatatatatatatatatatatatgaatgatgcatggagagatatctcttcccwtgcatccaaaatattcacaacttttcactaatatctgaataacatttgaaaaattgacaactcttctggctaaagatcagcatacacattcgttccacagagacttgtgccaaaatcttgctcagctcaaggggtactgcacaataaacaataagaaacttttataactccgactaatagaactcattgcttttccagtttgaagataaaggatgtctgcttgctttccatgcctaattttcctgatgctgtaaagctgttcaggaaagttcccactgcaggagttttgctagtaatcttcagctccgtgggaagcctttggactctgttgctatccctgaaagtggctgttcttctccatcagtttcctgggcaagggctcgaaccagctattagtgtctatttgcactgcatgaaaacaaaatttaatgtaaagacgcttatagcttgcctaccctaaaaccccaggagtctcattctgcctgaccctggacattttttgaactgatagagggatgggtatctggtgggtctcttcagtcagctcatctcagcatgttgaaagtccaaatgacccttgcctgaggatggtgaaagtaatttgtatgtgtgtatacataatcctgctttttcactatttccagtcacagattgcagagatagttgactgtgcttgttagtgtgagtgttaataactttgctatgctgatttttagacttcctatgctatatgatctccctgaagagcatgacagagcattgctttggaaaatcaatattcggcgtgattattccttctttcatgtgtaatcaaactttgaagaccaccaataggccaaatctacaagcattaggtttctaaacatattgtttagtcaggagaaattgtgttttctagctgaggtatgccagctactggtatggagaaaatctgcctagcaaattggaaggggccagaagctcaaatgctattgagaaccactcaacaattcttttttcttatacacaggattgaagcacagagcaaaaggaaaatccagctttgggatttgttcccttgaacttacaaatgattcattagaccaatgacattgtgagaatttggtctctgacaaagaaataaatgttttaaaaatagtgctaatacataggtacaaatacagaattatgtcaggcatgtatttttttaaagatagagtccagtgaaaagaatacgtgttagaatatggattaggtttctaaaggtatacttatgtctgccttcgtcttcagaaaacaaagttgtatgtacactttaagaaaggtcttagtgtggtaaacgtgagggcaaaccaaagtcctgttacttcttttgtcatatcattaaagcctccagacggaggtttcttcccattatgtgatgtgcagaatttcagatgtcagtcagcagctgaagtcaactgttggtccaccaggcctctaagctgcagcctctgtcagcttggggacagtgggatccatgtgacttgcctgctactgcccttgattgggcagatcacagagcagatggcctgtgtctagagtacaaggtgttaaggctttttttttggggggggaagaaataattcacatgtgctaatattcctggatgtttcactgataatataatatagaatgtatgaaaaaatcaaagtcaattagaaccagaaatctcctgatactggatgattctatacataaatatcttgcactaacagcaagaataataaaagttgtacaaaaaatgtctgttcttccccagaccatgagctccatggaggcagagaccttatttggttggtttactgcccttccccaatgtttctaccaagctgaacatgtatccagctctcagtgccccattgagttgaaataaattacagtgacataaactatgttcttcatcaaatgctggacaagcacgtttctcaggcaacttctctgggatcaacataagaacagggtgatgaaatgtgagaagcagtgagggcaaggacttgagcctggtgcctacctaaagtttacactccacaagtattccacccaacacttcagataccttctcttctttcaaagtcaacagtttatgcccattgaaaataaatacacacacccactcatgcccataggcatgtgtgtgctaccagaaaatatgtacatgttaggctctttggaagcagtggtagtttggtgagaattgctgcattggctcatcaacacagacctgatcgcactttgatttcatatcttgctatgcagggctcccattatctgcctgccatttgtgtgcatttatgtttagcgtcaatttctcctcccatgaggctataatctgccttgtaaggagctaaaatgggaaaagcagttagaatgatgagtccagttggagcctgctggggaacaagacagtcatcacaggccaatcggcagtggagacagggtggccctttatcacacagaggcatctggagactgagagagacaaagcaacacagctgcaagccgaccatgatctgctggaagcttcttcagtcataaagcaaaggacagtaattctgaatgacaatgtaggaaaacaaaaaagaagaagaaagaaagaaaatggttgagcccagacgatcatttttagttacggatgtcacaaatggtgattgctggtagtgaagtatctgaatctgaagaccagctgtatatagtatgtgtgtttatggaggtgtgtgtgtgtgtgtgtatgtgttggagaagacctgcatgcctagttgtagcactagccagaaattcttgtttcatcgtctagaatgtggccagaggtttgcctaaattctcataagtccattactgttcttctataaatcaggctgcctgttttgcataattcaccaggtaattcacctatcactaggcaaggcagctgccatggagtgcatgcaggaattcccttcattgactcaggctggtaccattctcagcatttttgctgtttatatatttttattttggtctcggttttcctttatctaaaaacgtcaagctgggatggatccttggagatgctcgcttaaacaagttcattacacttaaaatagttttacaagcacaagtgaaaataatgtaataattgcagcagattcttagacctccactggatcctgggttgcctgtttcctttactcagttctagtttctaagtttattgctgggttttgatgtatgtatgtgtgtgttaattttttaatatagaatatgaagtttgagggaaaactattgcccttattcttgtcgatttgttattcgatcttttcttttcctctttgttggtatgtgaggagttgcagagcaaagctgctgagatcttatatttgactgaggtttcacaagctctgcgagatatcctaatcttcagagtgacacctggtttagccaaccacgtggaaaaaactaagggtttagatataaccacattcaaccacagcctttaccttctcccctgtgctttgctgtatctaatgacggcccagaaaggtgcaaagagagacttttcagaaaaagcataaaaacaatcaagaaggaaaaaattgcttggttgttttctgagatacctgaaccagaagcaattgagtatttaggtgtaactttctatgacctattagaatgaatgccattcttatggcttaaatttttttcaagatgaagagggcacttatatagacaaagaatatatttcccataaagatatattagcacaattctaattaatcttaaatctaagtttttgttccccaagtccaatactcagtctagaacatatgcccttttctgtgatgcctgctggccaccatgtatgatcatggtatattgtgcattgtacaaagtgcccagccaagggctgaaatcaactagtgctctacttatgaggaattaatccaggcatggcgctgtgtctaccccagaggatgtgccttttctaattttcgtaaagttactgcaatgggccagccctgaagatatacagataacagaatcctatgacttttagatgacattagccatcatgagagcctgcctctctgtaaatggtgttagggtgtttattatcagcagcattgggaatacagttgttttgatgtgttttctgatgccctgttctaaaattcactacttctctgcaggctttggaaagtgggagtgtaaccactggtcctttgggttctttgtgaagttgtgctaaccataagatgccgcatactctcctagtgaccacagtttttatgggaggtgatgtacagcagcaaaagtctaatgtaaatctcatgttggttcttccagagcaggggcagctagagtctaataatttcttgggaagagtttctgtacctggaaattttagatgtatatcaaggacatgtgagcaaatgggaaatctaattgcccagtgcctctggagcaaagtgtagagacagaaccagaatgttttttaccggcacatttctgtattaaactaagggagggaagctctttaactatatgggaactttttctcattggttcctttaagtgtcttaaaaaaactgatgtcttcctaagagaacttgtgaaaggtggtaaaatgtttaattggaacttaagaataacttcctactgaatagctttgttgatttcactttcctgtggggaaaagatagacattgacaaaactgtttcgatgagaattaatcatagctgtagatttcaaggtatgttatgatactaggtttcatctcctggatcttcctcctctacattaaaatgattagaatgataaactcaaggcatattaatgatccctaatcaatgtaaaaaaattatcatttctcttctttatgctgtatttactgtcagaaatacagacatacatattaggaagatttttcttgaagggaattggcacaaaagggttgagacctttaattaatcaaaaaattgaccattccttgaaccttgattgtttggtatcattaacaaaggacatgagacaacatgttcaagctttataatttgctggaaataatattttctttttttttaaaaaaagcaattttttgttgtaattgttaatcttactatatatttgtctcctgaaaatggtgttatttgccactccttctacgtattaattggtgtaagctcttaagttatataggatagttttaatttctccaaaaagctgcctaaggaaagtaaaacaccataaagaaaagggtatgtacccaagaagtagcaagaaactaaagagaagagattgagatattatcatgagaatttaataagagaattaaatatctagaaaaatgtgtacatacttagaagtagtaaacattaatttcctttcttccatctatagttcacctctagatcactcttttctttctttagatcatcagtatccaagattggaaagagtaaatgagtgttgataaatgggcactctcttgttctgttgatataagcttaagttggggtagcttttctggaggactgcttgacaatatacgtcaaatttatattgtgatgtcctttggccatgcaatttacccttcctggaatgtacgctaagtagataattgaataagtgaaaaaccaaatgtcttcataaggatattcaccatagttttgttgaaaattatttacaaattggaaacaatctaaataaatgtcaatacaggaatagtttaattgcatatagaactgtacatacaatgtaatcctatgcagtcactaaaaatgaaaatgtataggtgtattgattgccctgggcaattaccataacgtataaatgaatgagtaaaagtatcacagaataatactcttccctcctaagtaaatcctcaccaataaatcctattatacaaggcaaaacctgtatattatccctatcccctaattttcatcatctctcatatctaatccaccatgatgtctttttcattcctaagtgtgtttcagatcatccacttccctctaactctatcactgtcttctggtccaagcttggtattcaattaatacttgttaaatggattctgaatatgattccattcataacagcacacctatccacgtacgtatgtgaagacacaggtgcctagagaggtgttcactgaactactaatggtggtttcctcttctgtggtagaattcagcattatctttatttttttatttgaatttctcttgttgtttgaaatatttttaaataataatgtgtaatttacccctctccaaaaataaaacttataaaatggggatgataactattattctacctttctcactggataaacatagtggtcaaataaacaaatactcgtgaaagtcttttataatgtgaaaacaaaggtttttttgttattatgtgcaataataataataataactatagatactaaaatttgttgaatatatttcctcagtattttgagtgtcttaactcatttaaatctcacaataagcctatgatactataaatatacccatttcaaatatgaggaaactgaagcagagacagacgaaataatttatccaggtagacacagccagtagagctgaggcaggatttgaccccacacaatcaggccctaggacccaagccctaaccactgtgccaaaatcataatacctgcaggaagtggcaaatgttgaacttagctccatatatcagactcttgccactgtgaagcccttacagataatttcttttcttttttgagacggagtctagctctgttgctcaggctggagtgcagtggcgcgatctcggctcactgcaagctctgcctcccagtttcacaccatactcctgcctcagcctccctagtagctgggactacagccgcccaccaccacgcccggctaattttttatactacctcagttaatttagaaagattttcaggcactgatgaatgattttgggagtaatcccaagccaaatgacctctgttggaagtaatttaatagatgtgtttaaatattagaggtgggtgagatggtgaagaattaacatttgaggaacatttggtatcctctgggcaatatgtagacaccctttcaataaatcctcacaacaccccagtaagttatgtgttatttgtttctattgtaagttgcagtcatagataaggaaactcagatatgtattaagtcatttgctcaggtctttacagctattaagttgcagagttgggagcccatctaaactcctaagatcagggtctggatcacctctattattttacattgggcatctatcatccaggacctatgtgctgcaggaacgtaattaagaatgactttgacaagataaatatttggggacatgaagcctgatcacagagtctaccagttatgtggacttgggcaagcaacaccatgaacctcacttttttcattctcaaagtgggactaatgaaatttttcctgcttctccaaaagataattttagtcactctgttggtgagttttgcaaaaacattgtagtataagccttcacaaggaattacagagaagaagataagtcttagcattcaagaagcctggactgtacctgtctcaaaattattttatgctaaatgcagacaattttctctatttggagtttctttcccatcttagttggcctcttctcagttttctgaatgaagcgtgcaccctcggatgtctggcctttactcctgcatgtcttccggtctggaataccttcccctccctcaggaacttaaccagcttcaacatgcagccttcctgaacactccaacatgaagggatgcccttctgttctaaatgtccactgcactgaacaaatcatttaatacaaatttctctgtagtttatacagaggatttgtgtttatgggcttatatgttttctttaaaaataagttataaagtttttgatgctagagcattcttttgtatccccaggagacactcagaatatatttgttgattgttttgattttaaagaaaaaggcggaagaatgaggtaaaatggccactatctgtcaggaacttcatataattatctctgcccagaaataaattaaaatagttttcttcagccagttgcaatagcttatagaaaaaaattaccttccctagatgtcagtgtcccaatttggaaaacagagtttggtcatatattttgtccgctgttgtacaacctttagaaacataaaattcaagaggaatactaaataaaaggatcaatcaatactgagttcagctttaaaattatttcatctaataatgctggttttcttggcagcactagcaagggctagaattttttaaaaatcatccttatatatgtattgattgaatttattaaaatgctttattaccatatccatttgcttataagaaggcaccctgatgtgtcctatatgagtttcaaaacacaattaaataaaaccatgcagagcaacaaacactacgtagcatttacaaactgcatttgtattcatttttatgtacatgaagggaaaaaaaacccaaaaggttgaaagccttctggagtgataaatgccacaatttagtggaaaatacacattgtaatttgagaacatctcccactaagagtcagtgtagctacagggacaagaagcctggtgctaaattgtctgaacattgatgtcccttcaaaattcatatgttggatcctagtacccagtgtgatataatcaagagataaggtctttggggaactgattaagtcatgaggggttctccatatgcatgaatgggttcatgctcttataaaagaggttgaagagagcaccctagggcctcttgcccttctgcttctgccatgtgagggcgtagcaagaggcactctttatgaagcagagtgagcccttgccagacactgaatgtgctggcgccttaatcttggacgttccagcctccagactgtgataattaaatttattttatttctaaatgactcagtctaagaagttttgttatagcagcccaaacagactaagacccctggcccacaggctcctgagcatctcagtgcctttgaggctataaaggacctcgaccttcactttcagcacatgttcaagtaaaagagaaaaatgtgtgtaaagaagtgcccatacccaataaacatacccatatttattgcaaattatcctctaaactgtttcattgtggtcaaaacccaagttataaatttttagtgtccttttaagagttcagtatttgtcaacctacggtcaacatttgcatcaacaaagaaggtaagatatgttgtgttatctttgtcatttttcagctgtcaactaggataggggccagaaatagcaaaactgtaaacttgaaattgtttcaggaagaagtgtaatagctaaggggtgtctatgaaatggaatgtatatcaatatgaggtaagacagctggtaaaaaataaaaaattagcaggaggggcaccggattcatgtaccagggaaaataatgtcatgttcattgcccagagagattcccaggaattagagattgagaaatattatttcttgacatgtctagaggctacgtggatagaagttctggaaaatgtttgagataaaggccaataaaaagcaaaaggacctgaggattctgtttattcactgaacagagaagctaaaaattgggctctcattttggacaaaaataaaagccatagtaataagtaaaataaaataacctaccaggtagcagagctcttagcaaaggattctgcaagcaaaaggcaggtgtgaattgggaaagtgagtctgggattgaggtgaggtggggttaggtgtagaacagggctatgaaggtcagggcagtggaaggtttgattctggaaagcatggcttcaagggaaaacttgagtggtgaacgggaaaatctgtgaggatcggaaatgtaagtctctatacttgctggggaaatgagcaagaaatgaaagggagagagccagatgacgcagctggaagcagaaatctgagcagggggaacctggcaacagagaggaggagctggaagaacaggggcagatcagatctagagccaagctgtattctctggccccatactttaatattctacctatgaggcgcagtgcctttgggtgttgttcataaaattccagtgttgaaaagggtttcagacattgtccgtgaagctcctctatccatcaagccctttgcaatatttacagtaaggaaagtgggagcgcttcagaaagagagagagagaaaaatgaaaattcctagccccatctagacatgccttatcagtgagttaggcgaagtgcacaaaatttaaaagtaagattctagttgtttgtattttagctattcacgttgcatcacaagagctccacaactggatttaaataattgtttctgccttagcaatcttaagtgtgcatgtattgttcagctattcctttaggggaaagattgctagatgggaataaaatggaaatgctgttttctaaaagttgtggtcttcatagggagatagctcttcacttcgtgtgttagtgatgaacatttgcaagctgtagagctgtagagaacactttgtggttcttctatttgaagaaaccctgatggctttgtcacatattccaagtttaacttttatttttaaagagtttatacatcatatttgaaaaagactcaaacatgtctagagttatatgttagacactaaacatacttgaaaaagatttaaaaccttggttttagtcatctgtaagtactctattttaaggacaactaattaatacttataactcagataattcaggagacgatcaatgattatgaaataacttcctatgacatacttttaaatagtaaatgccttcactgcatgtaattcacacatcaatatatactaaactatttccattaatatagccagtctccaatttacaggaagacattatgtttcacaagttgattttaagtgaattttttgtaatatagaaagaattgtcccaaagagtgactgctgaactggttaaatccacaaaaaaaagcatcacatgaattcatctactaggcaaatttgctcatccactttcaagtcaaaaaaaagttttaaattagataaaaacctgtgtatcccctttcttagtaaatttgcctgctgtgataaatatacacgtgcacacaaaaataggcatgcatttttaagaggagtagaaacccatttgaacttgtccaggaactcaagtttagaggctcaaatgtagagaatactaataaccacctataataattcttttggagaaggcatactgtattatgcctagtgcttaataggacaggggatttttcatctctcatgtgcctgggaatgagagccaggggcttcccccaattctaaaaaaattagcaattcagcagaatctacagtggggccaaattgtggctgggatttgggggatttcatcaaagtgggtcagaggtagaggtggaagagaagcagaaggccggtgggagtaggatacagtacaggggcgagcttccagctggctccatcagttgaggaagaagaagcaatcccaggaggtccatactcttgatattttatccctcctctcactaaggacagctatgccctttgtgatctgccctagactgactttttaatacagagaatgaaggccagtacagaaagcaaggagagaaagaagagaaatagatgctaagttgtccccttgaggaagaatgagggaaaatggagttcctgccaccctagtctattagctgacattgttactcctaattcaaggtaattattggtatgcaaagaaagtatgtattaactatatgtcaaccagtaactccctgaaatccacttgatgatagaaaattagtctatggccatatcactgtgaatgcaccaaatctcatctgatagcaaaatattgcatacatttcttctagaaactaagaattccaatgaaaagctatgaaagaatcctacttaggtctgaatttccatacattcctggtatctcagagggtggcaaggttagaaaacttgagaatctgtgggcacactagggatgaagtgatagtattctttgttggatatcaaaagaaatctaagcaggagaaccaaaatccattggtggaaccaaaaaaccattggtggtctgaaaagttaggtgggagaattgaatagcttagttctagggatcaagtaaccaccctgactattgagcttcccgataagacaacatgatggaaactacatggtttcatccaggtgctgggaacaagtcctactgaacattggcttttggacaaataacaggcagattctttggtgaagctttgttcatctgaaactcttccctgtcctctcttctccacttcatttttctgatgaggagaatggaagtttgtataaactagagtgctcaagcagcaggcagtggaagaggcaagacctccaagtagatctgcaagctctgaaccaagtgacctatctctargccatawtgaggaaggccaatgcarktttgcgatctctctacctcttcatttttccttttcctcctccccttccccttttgctctccccctcttcctctcaagagagtaatgtgctagtagtacctgatggtaccccagtgcttcctgccttcctcccttccacttcctgccttcctttctcccacttcctgccttcctcccttccacttcctgccttccccagtcccacttcctctcttccttcctggcaccccccagcactcccttccctccttctgttctccagtaccttcctttcttttcctttgcccttctctcttcctccttctctctttattttccttccttccttcctctgcaaggccttcttactagtttccacccattttcctatgtaaagcgattttgaattctagccatctgttaatacaaggcagtgaaaaatgttgaagtcacatcaaattccacttgctctgccagttaaaaatacagatgcttcctgttttatgctttcctctcactttctctagagtttaaacatgaaaatatgttccatgataaaaaccagcacatattccctttcatcaggaaacatattccaaacaatgaaaggaaggggagggggattattttcacaagtccagcaaggatacttggatgttgggggaatcatttgtagaaccataatttcacagagcaagaacataattattcacaactatcacattttatagatgaagaaactgagatcgcagggaattgttataattgttctcatatgtgctgcatatcgacttgccaaaattcacatcagcttaaattttcacccaacatgcctggtcctcaattgttccacaatactttttgctatccgctgatttcagaaagggttcttttggctactgggagaggccaaatcactaagcaatggataattaacctgaaactcagtaaatgcactggagtgaaaaaaaaatgtgagactaagagtcaagacacctgggttctagtcacaaatctgttactaactacccatcccaactcatagcaaaaatttttattaatactcttgctccacaaagagactagatcaaatggtctctaaatttactttcaactctttgaatcttgagttttcttccttcaattttctgctgactcagagcgtatagccttggccaagttatttactgccataaatctcattttttttccaagatgaaagggagaataacacattcccctattttcccagcatatatatatatacactatataatcttgcattaaattgactatctttagaaatcacattaaatcctttctatctatagactttggattagtcactaaagctagaataagacatgggccatatcattaggcaatgtctctggctgtagttgtattatcaaacactgcattgacgcttgttcatccttgcttccatcatacctttttatgtaagctgttctaattcttacatgactataacatggagcactgtatgtcaccatatctcttcctctcattgaatctgatcgtattctaatatctcctatctcaatgcctagttcttcacccattttaccaatgcaatatagaaactttcttactgcctttttatttcttacttttcttttgaataattcaccaagttattattgattttgtctgcctgatgtctttcaaatttatccacttttctctcttccatgatatcctaatctaagctaccatcacccctcaactgaactacagcagtcaaaagggttatttccacacagcagtcaaaaggattgtttcaggtgctaaatttggcaatgtcaccccactgaatggctttcttctggtcttaaagacccgattccagaacaaaacttacatggtaggcagctcctggcccttgactgtgtttctagtgtcatagtacatgctcctgaccttttgccctctttgagttcctcctcctcactatcctttcctggagattcaggtttggcagttccccggggttagaatgctcctccatgatttacctagttgctgcttattcttctggttttgtactgatggtcatgttctcagagcagccttctcagcctccctgggtcagttccctccatcatgcaccatcattgtgccttgtatccttgctgttattatacttatcagagtcgtaattttacatttgctcatgtcatactttttagattatgctttgctttcttctccttcaccagagtgtaaactctatgatactatgtctatttttatgtcaccattgtaattccagtgcctggcataatatctaatgcatagaaggtgcaggctaaaattctattgaataaataatgaatgaaaagaaagaatagaagtgcctgagttcaggccctgtatccccattccctcatatatgtggttggaaccatagaaggcaaaatttggtgttaaaagaataaagctggcaagcactgatgtgcctaacaggataggaagttcagaattcttttttaaaagtgttcaagggcccaggagtgcctggctaacataatgagacccagtctctacaaacatttaaaaattacacaggcatggtggcatgggcctgtattctccgctactctggaggctgaggtgagaggactgcatgagcctaggaggctgaaggcttcagtgagctgtgatcacaccactgtagtccagcctggtcaacagagtgagaccctatctcttaaaaaaagttctaggatattggagttgataatgtttgtaaagatcaacgctaacattgcctccaaccaagtctcaatatgctccaaaaagaaatacttcaaattaaaactcgtgtgtgtgtgtgtgtgtgtgtgtgtgtgtgtgtgtgtgtgtaaggagaggtggctcatacctgtaatcccagcactttgggaagccaaggcgggcggatcacttgaagtcaggagttcaagaccagctggccaacatggtgaagctccgtctctactaaaaatacaaaaattagcgtgctggcatgcacctgtagtcccagctactcgggaggctgaggcatgagaatcacttgaacctgggaggcagaggttgcagtgagctgagatggtgccaccgcacttcagaaacagagtgagactctgtctcaaaaaaaaaaaaaaaaaaaaaggccgggcatggcggctcacgcctgtaatcgcagtattttgggaggccgaggcgggcggatcacaatgtcaggagtcccagaccagcctggccaacatggtgaaaccctgtctctactaaaaatacaaaattagccgggcgtggtggtacatgcctgtaatcgcagctactcggtaggctgaggcaggagaatcgcttgaacctggaaggtggaggttgcagtaagcagagattgtgccattgcataatggagtgaaactccatctcaaaatatatatatttttatatatttttaaatatatgtttataaatatataaatatttttatatacatatctatatatagagagaataaatatgtatccacagagagagggagagagataccaagacaaacttataattgctataaattcaaataagagagaagtcagtaaaacctagagtaactaggaaatactccctagaggccaaatttgacctgtgctttgaaaggtaattacaattgggacaggaaacggcacggcttctttctcaaagattgattattctgactattctccattagctcttccttatacactttccactttcccaaactctgtcccgggatgctgacatgaaccacgtcaacaggactccctcacatcctgtcttcaagtagcatttgcccagagagaggcctcaggcaggaggttgtaggatggaaggagagatttgcaggcattcatttccctgctccctccctgcctggctgcagtgggtagtagctaattcctcttctgaaggccacagctcctggtggatgcccccttctcacttacaactgagcttctcagtgggttaccccttcacaactagggttggtcatggctttctgatgctgtgatcacccagggtacttttaaactctctacttatccgtctggggtgccatgtgttatttgctaagaatgaggtaataggaattttttaaaaaaagattaaaataatactatcagcctgtcaatggggattcctcccacccccaaaaatagagttgttcgtttctctttgtttggtttacatgatatatatatatatatatatatatcatgtatatgtatatgatttacctcaaaacagatcacaaagctgaggtcacttgaaactgactattacaagctagctggtagaattaaacttgtttccctaagtaaaatagaaaaatttggccaagagataagaaaatagctgcccctcaccaccacaaacacatacatacacactatactgaatggatcttcatagagagtaagttaataagaggccagcccctacctctgcttccctccccagggacatacatataaatagttcagttatgtctgacttaatagatttgggaaggaggaaacgtgagaggctagtccttctgaagggttgggaggtaagggtgagggaagggaggggagcaaaattacggtactgggatttggacccagataaaagctgctttgtcacatcatcccgatgtaaaatccgtgcatctgagagatagcccctgagccaccacacaggctcctcccaccagagtctgtctggcaggggtcagtgctgcctcgctgtggattagagggagtcatcgacatgtcatctgccatcaaccacacttattgtgaggaaaagaatgccccatacacatagaggccacccttgggatggacttttgagttgactaaagagtaaaaatcacaatggatcatccactagtcagcattattacctttactaacaaaaccagtagcttagccacgatcgtataaaacaataaatgttggttaatttctaaagtacattgattgttttagtttttgttttaagaaaaaggcttggccgggcgcggtggctcacgcctgtaatcccagcactttgggaggccgaggcgggtggatcatgaggtcaggagatcgagaccatcctggctaacaaggtgaaaccccgtctctactaaaaatacaaaaaattagccgggcgcggtggcgggcgcctgtagtcccagctactctggaggctgaggcaggagaatggcgtgaacccaggaagcggtgcttgcagtgagccgagattgcgccactgcagtccgcagtccggcctgggcgacagagcgagactccgtctcaaaaaaaaaaaaaaaaaagaaaaaggctttatgtggctgttgggaataggattatttcctctaacatttatcccagtatttttaaaataaagaaacatttggtcgatgaaaagtatagaatatttgtggtaattataataagtgaatacattacataatgtcctttgtgaaaaaggcttacattattataatgggaaggaggtaaattaatctgagtagtattagtataatagtcttagtaattataatggaatgaatcaccctatattataattatgattcaaataatatatatttttagagatcaaccgtttcatgatgtgctggaatgggatgtggtaataggagagcagtgattttggctaacacattaggtattctgagtcaatttggcacaacagcagaaattattttctctattgtcttattgagaagaaacgtcctaagaaggatcttggggaaaataaataagtatgtgagtctgacataggaagagagggtttcttcccctgcaaggcaccttgtgaaagcctagtggggagaaatagtgggatgatgaaggatggggcaggttacttctggaagcaaaattcagatcccgagtgcaggtgttgttcaggcctctgtgccccactgtaagtgtgctggcttcattgaaagggatgagaataaggcagacacgttcaaatatgcagagtgagggaaaatacaaagagcatatttgatattggttgaatgattgagaatatttgatatttgatattgattgataattgatgagcacttactgtgtgactaggaactgaactaaatgctgccccagagatcattcttatttatgctcacaccactcatgaagcaaaccattgttgttattttcattcttcagatgaggaaactgacagtcagtgatgctaagaaacttgctcaaggtcactacagtagttattgtgggcctggggtttgaattcagcctaactccagagtctatgaccttaaccattaagtgaaataagtgaacatcttcatgttcaggacatgtgatgtgtgtgcacacgcatgtgtgtgtgtacaaaataaaatatttgaagccaacaggatcctaagtctgggtgggtcctaatgccagagtgcttagggacacttcctttttaagcaagatagtttgacattgtcagcttttaattgtaatttaatttcttgtgtgaacattattaaaatgtattaaaaccagatcaaaacatccaagacttttatccccctgatttttatagaagccctctgcttacaagcacttaaagagagatgaatccttatttttcctctggtaagtgatttctaaattcccgtagaaaagcctttaaaaagaaaactcaactagctgcatttatggacttgaatacctacactctactaaaattattgccttttcttaatgatgttcctgactcatcctgaaaattgatcatatatgtataaggtgatgctcactttacaggtggagaatgttgtagccacaagtaatgaagactaatatatagatatttaaatccacattttgtccagaattctcaagcagggagttctaacctagccccacccctcattccctcattaagcattgttttcttagaaaggattaaaactggtaatatatctgtaatcaattagctgacatgacttaaaattgataagtcatttgatgaattctcatctcaaattccgaatgaataaacaatgagaaatgggaaagcctttggcagagagagactcattgaatcagttaattaaggaaagagaaagagccagagtacaagctatcaatatcacctacatgggtcaagaactcatccttatgtgtgtaataatagagctactcataaacctgaaatgatacaattaattacggaagttatagaatattggagcatcctcgggtgaaaaataattgtgtctatattataaaagtatgcaacataacacattttatctgcatttaacattttgttggtgtttcatgcaaatgaaaaaaaaaaaacactgtttttatgatttagccaaaccatgctaactctagtaacaaccctcccaatctcagtgttttaatgcaacaaacagttgtatcttgttggtataaattccactgcattgttcttggttgggttgttccttaaagaggatactcaggaatccattctcttcctatactgttccagaggaagatggctcctccattttcaatacgtggcttcaaggtcacgctgacgttgttcagacagtgttctgttggaagagtgagagaaaaaagcatgtacatacaattccttccaacacacatacacttaactgctttggtttgaaagtgacataaaccttctgctcacattccattggccagaattcctcacacagtccccacctggcttagtgctcaggaagaggaaatagatttgatgatcatctaggcaatgtctgtgatgagattggttcaaaaaatgtaccagtaaaaataaaaataatcctgttcattacattccagaaaatgaactgattaaagacaaatatgtatgcatcacttttctctttacgtagtgaagcaatgtgaaaaacatattaattgagctattcatggcaagacttctctttataaacttcatacatctgtcactaaattgatatgaaagaaatatttgatctcagaaagaattttatctatcatgatggaatgctggcagccaaatgtatacctaaaaattgctgaaatattggagtaaaaaggaatagttagatcgatcatcttaattttgtgaaagcatgcgtacatttttcaccttggattcagttgtgttggcattttataggcacagttataaatttgcctaaaatacagaatggcattacaacaaaactcagactcatggtgtaatcattgtttttttcaaactaaaaacaaagaatgaaaaataaaaacctctaagaacaaaattactccatttaattaaattaaacagacaaaacttggaggcatagtagagatggcaaggaaaggcctcagaccccttacccccatccaggggaaatatttgccagccactcctatcttcagcaaaacttgagttatgatgtaaactcaagactcttaaatttgtgattaatcctgggtgtcttgaaaattggagagtgggttagcaaattcatagttccccaaatttgtgctatctactgctgttttcttgtggattataagcttgaaggaaatgtgctgcctagagatatgagctgtgtgtaattactcccacctgctgggtaaaatctttattacatgggcattagacttcattcccatcgaggggtgaggaggggtgcaatatgaaccaaccacaccacaaggcttgtgaacatccttcctctatggtgtctcctgacacttctttccagcttccaaatgtgatacaactttgactggaaactgtgaaccaatgtgtatccaatgaaccaagggagatttagctccttaaaagaaaattaaatgtagaaagatgtggaaggatcaatgaatcatatttatccaataagtggttcaacaattacaagagcgagacaggaagggaacccttccaggcagagtggtcctcagctctggttttccagcctagagacccatgtggcaggaacttggccttcatcattgaataccctgcatacacccttcctcaagcctcctttgtatgtgtgagagcactgacttcagaaacagaaatgagtttccagccctcaagggaactgtttgctaaagattggcaggagcccacaagactacgacacagtctttgatgagctggctctccaagtgtgggcagacttttgtttctaagttattgggaggctttctgtgggtataaaacctgcaaaaaacacaagcatcaatgttgccatattaataactgctttcatccttggcaagaagaaaaagaacgtggggaaaagagtcaggcgcaaacatggtttgagttttattgtcttttacttgctcactgcctacacctcccaccagtagctttggaaagagagtttcagaaatgttatcttatgttttttatccctaagaatggggtcatagtcttcaatttatgcctaaagtgtttaactactccttcttaatttactcgctctgcccaggaagaaaacagacataacttgcaaaggtggaaacactggtacgttaggaatatcattcattttcggattcttggcccttgagtttcactgttacttaattgacaaagctgagctgtttcatttcacgctaggaagtctttggttaaattgcaggcttgggtttctgtcctttggcagtggaagtaaagagaaatcagaagcaatgtagcatttatgaaccactggctcctctaactgcctctgtggcttcaaatcctgatgatgtcaattgtggtttgtgtatatgtacgtgtgtgaatgtgtacacacatgtgagtgcgtgaacattcgattcatttctcatttttgttctctctcttttcccctcacctccggaccttttcatccttctttatgttctgttgccttcatctcttagtttttctattctatgccccttttgtttctactcttttcatctgacctattattatgtcatcagctataagcaccatggaaaacactagtttcatcatctccatctgaaagaaaaaaaaaaactcaacaagggagaagctgaatatatctgtcttcagtatctatctttgaatttggaatgcttcctgccaagaaaattatattctgaaactccttagatcttgcagtcttcatgaagcacaccagccaatagctgcctcctgacatcagctcagatatctggttgacttttgctgctagctcttccagccaatgaaagtagataccttaggccagtgttcccagacatttaggttttatgggataataaaatctccaggagcaaaatgaagaggctgatatattgccttctctttaaattttaacacttttgaaaaactgccatctacacactaccgctttttacattttaacacttttttaaaactaccatccattgtcatcattattccataaaaagaggtattttaggaaggatactcacaacataagttggataaatttagcaattaaaaaagcactgctttacttttatcttctcctttaatcaaagatgggatatgaatatcaaccagcattgatccaattttaggcccttagttccaataaaattgttccttttcccatataaatggttatgcctttgggccaattgctctgtctctcagaggttattatatcctgttgcctctatattgaggattgctgtttcatctttggagttacaatgtcccaaagggatcactgatacattcttagctccagtatataaatagaggcactaagaaataaaatgagagggttttgacacctctccctctcccccaccccccaacacacacaaacaagtaaatgggttagcttttatttctacaattgcacagcatatttagtgagagagggaagttggaggtgggtatcacacatgtaagatattgcccttattttttttttttttcagagacagtatctcattctgttgcacaggctgaagtgcagtgcctcgaacatagttcactgcagccttgaactcctgggctcaaacaatcttcctacctcagccttctgagtaactgggactacaggcatatggccaccatgcccagataactttttaaaaacatttttgtagagatagagtctcactatgtttaccaggctggtgtcaaactgctggcctttagtgatcctcccattttgccctcccaaagtgctgggattacaggtatgagccactgcacctgtcctggcccttattattgagtagattgtagtctaatgaaaacatatgagtataataaacaaaagaaaaaagaaaacatatttagccaattcatagcaaaaggcagacagaagtagatgctgaatagagaaacaagactgttagagggcagagaaaggagtaattcattttgctggaagaatcaaggaagcaatcacaaaggtttaatgtgtaattctgaatttatgtgattgctatataatcattctgtttcatggctgcagtgtaagctgtgtgagggcattgtttgtatcagatgtctgaacctctttatctcatcccttatcatagtgtctggtatctagtctataacccataatatctcctgaataactgaatgggtgcctacaatgataagtggtgtgaaagataccaagaaaatcaagtatcattcattgccccgaaagcacctgtgagcacataggtttgcaaacatgccacatgtgttcggtcagcccattgcttgtgtacatgatcatagatggtcatagggatttacttcattctgaaatggaataatttcatcctcaccctgctttaccttaggtaaagattttgatgccatttttattaagacatttacttggaagtaaatgtcatgctgtgaagagccattatagacaaatattgtagccacttgccaagtaatgacttatgctgggaagttgcttaaaaggctgattttattcattttatttgctatacccttgtgctacttagagaagggtagagaatgagagaggagcaatatgttttgttctcttttttttcataaatcagtaattatttgcagagtgttttgtgtaaagtgctcagctcacaactggaaatagaatcctgggttagacagtggccatagtgatatttacatatctccagcttgtagtttgccaattgaaatgcagacatatgcggaaattgcctcattgtcattccttgtttttgtaatattatccttggctctacggattcattttttttctccttctactgtcaacactgttttagcagtgagttatattatccggtgacatcagagaagcaaagctacatgtgtcagcttggcaggaattgtccacttacagcaaatttgtgacaagttgtatttttctaccattttcacctggagtgacgaagaatctacagttgagggagacaacatggacctcccctgatggtaacagtgctatgtccaattgagctgctgttgcttcagtaccaaagaggaaggagctggtgatctttgaataatccttcccctatgaaaagtaggaatgtatccccagagttcattgtctgtatctgtaggtaatggaggcttaactggcattaaaatcatagccagtttcagacccattaagtttaatggtttttgtaatgataggctgcaactgatggaataaccaaaagaacaattcatggactgtttatggaagaataccttcaccattcaaaatggacattaaactatggctggtttcattgcaaggcaaaagttccctctttatcttctagttaggtccatgtgcagcccaggaggtatgtaaaagctatactttaggagaaaagttgacttgaagcttttaagctaatgagtttgaacttggcatgttttctattatcattgtctttaatcagtggtgttatataataaggagctaataaattaatctaagtgtaagtcaaattaatataagttaaagtcaaaatccagctaggcaaagccagataggcatattaaaatggcagcccctaccccaattccttgataatccattaaaagtagaaagttttggttaggaagccacctcctgttacgtaaatcagaatgtaagagccatgagattagggattttcatttgttttatccacttttatatcctcagtgtctagaaaaatgcttagcatattgcaggcactctgcaaatattgaacatacggggttgatgaacatataacccattttggttgatgtagttttatttcttaagaggtaaaaattctttcagaaaaagaaaagtaatcatttctacaaaataaccctccactggttgatattcttcccagatctacctttcttcacacagatctttttttaagagaaaaccacagggatatgtggctggtgcaatcaatgataggtttgggatatgataaaatgtaggaaatggctaaatgggagagtacatgatttataaaatagaatttaaaataacagccctcaacagcagatctttgccagcagcacatgatgggaaaatataaaccccattctggggatggcatctggtacagattgagaaataaattgggcagcgaaacagaatgtgtcttcagtggtccttaagatcaaaccaccaatgataagcatggatcattggagcctccaccttgctctttttgaaacagctaaaatcagcaagggaatgaaaaggaaatggctttatcatctgtgagcagcttgcccctccctctggagatccaaatctccaaacatgcattttgatatactttgggagttctctttatctagtaatttcatttaggggaaaaaaatatagctctccctgcccacatcccacattgttacatcactgattcctcaccatgctaacacattcaataatctgacgtgcaactcaactagaagagcaatcacagccagtgatgggccggcatcatggagagtaaagacaaatggaaacaataataactgtggaagaagcagatctcaaatgggaaactcaatcccagtgatcagggaaaactccaaaggaaggatatgagttcaaaaaaatcaattcaacaaaaacttattgtctgtctaccatgtatcaggcatggggatatattactggtcaacacaatgtgctttgctgcctggtgcctgtgttctgatatctggtgtgcatgttctcaatggtattgcaagttgcattgggctagaatcatgaagtattatcaggggatttacttgaaattaaattagtcccattcttgtggaaatctggagctggcatatgcatggaagtgaaggtcttgttgctggttgaatttagtgccctctgcaatgaaagccaaatcccaactttagtctgtgactggggggccttctacaaagagaatgaattttaacaattaaccaacaatctaaattcttggaaagtgaaagtttctaaaacataaaatccatgaagacagaattagaaaatcaatgtgtcctttttggaggaagaggaaagccgctggctgaccacgtcactttcatgtttctactcaaatcttatcaacaaggcctttgttgaccattcatccccttcctaggcccccttatttctatgtctgtcttgtatcatctgacacattgtaaatgtccttatttatttgcttactgtctgtctcttcactctgaaatataaattccatcatgtcagggactttttcttcatcttccccaaatgatgtttgaagcctcccatctaatgctgagaggtatttccctagtagccctgtcatcactttcctaccactgtccctgttgccacataatttaagattccctgtggccaatgctgatgtcattatcatggacgtccttaggaaacgaaaataatttaagcttctaaaatgggcaaattcgatgtagagttgatgggtacatcacacacccatctagaaaagagcatctcaggttggtacctgaaacttggtagactccaccccaagtcacatggccaactgatgtgttacttcttagacatcctgctttctctgtccataggcctggttgggtggtctttttcagatactaaatcatggtacaattggttttcataaaactagtactctaattctacttttccagtagccttgagtaaaggaatgttgaaaacttgtagtgatgaaacgtgtaggatttgcgatttgtcggagtagggacaaaactatttgagaacatagtccagctgaccaaaagaaaataagttctcatattactaataacttttagggatccaataggctcaagaattctgaggttgggtttgacagtgattagtgtaaattaagtagaagtagttaagaaagtggctgaaattgaaggatcggttgtggttagtaaatatggaggattgaaacacaatgcaaacttgataattgataaccttcatttaattctaactaaaagcccactttctggtccaaagttggaactaagaatgaattctttttactctgagaggatatttacaaagaaaacacaaacacacaaactatgggtaacacaaaagcaaactagaatgatttatcttattattctgttatgggttgaattatttcctcaaaaaatatatgcttgtcttaaccccagtgctgctgaatgtgactttatttggaaatagagtctttggaggggaattagtaaagatgaggttatactcaagtaaagtaggtccttaatccaatacaactggtgttcttattgaaagagaaaagacaacgtaaagacatagacacacaggaagaacaccatgtgaagacaggcagtggtcagaattatgtatctacaagccaaggaatgcctgaggttaccagaagctggaagaggcaaggatcccctccagagcccttagaggaagcagggccctgacaacactgtgatttcagacttctctcctctagaaccattagacaataattttctgttgtttgaagccaccaaatctgtgatactctgttacacaaatcctaggaatttgatacaccttcctagacccaagtggggaagaaaagggagaaacaggtttagaggtggagtaaaagataacagcttctcacaacttgaggcaagatgcgtatgctgatggcagagaaaggagttggcattttctgaaagcctgtcagatcccctgctttgtctgggaaggggaggaatatccacagcgtcttagcaggtgaaatgcagcagcgaagaccaggtgcctgtattgttgcctctggttgtgcagatgaagagtcattaggctgacctcatctatggacccaactggaattagccctgactctagagccactggatgttcaggcaaaactgaccctaaaattctttttaaatgcattgcttaagccaagcattctcttattcaaaatcaagctgctgcattttcatgtagcatgaaatgcaattttctatttaaggtgttcaactaacttagggataggttgatggccaaacaaagaaggtttcattaagatggaaatgatttggagtatctagtctccaaagtgattgctctagagacatttatcaatccaccggtggcttctagtcgatatttggttttataggttggggcaaaagtaattgcagtttttgactttttaattgcaaaaccgcagctacttttacaccaacctgataatattccccagatccttccctgcttcctctcattagtaaccagagcaggctgagaatcacttacctgtctcttgtgttccacaatgcacactttgaccccatctagtctcttccaatatcatttactcttgtccattagcggattttctttacttcctgtgtgtctagcttgttggggggatagggaggagaggagaggctgaggatattttttctgtgtgtgtgtaaaggttattcaaattctttatcacttgcttttgctttttaggaagaaaaaaacatgaatatcttataacactattttttaaatgaaattgttcagcaaattatacttaattatatttttaattttaagttctgggatacatgtgcagaacatgcaggtttgttacattggtatatgtgtgccatggttgtttgctgcacctatcaacccgtcatctaggttttaagacctgcatgagagggtggagccaagatggccgaataggaagagctccagtctagagctcccagcatgagcgacgcagaagacaggtgatttctgcatttccaactgaggtactgggcttatctcactggggaatgttggaaagtgggtgcaggacagtgggtgcagcgcacccagcatgagccaaagcagggagaggcattgcctcacctgggaagtgcaaagcgtcagggaattcccttttctagtcaaagaaaggggtgacagacggcacctggaaaatcgggtcactcccaccctaatactgcacttttccaaaggtcttagcaaacggcacaccaggagattatatcccacgcatggcttggagggttgtatgcccacggagcctccctcattgctagcacagcagtttgagatcaaactgccaggcggcagtgaggctgggggagggacgcccgccattgccaaggcctgagtaggtaaacaaagcggccaggaagctcgaactgggtggagccaaccgcagctcaaggaggcctgtctgcctctgtagactccacctctgggggcagggaatagccaaacaaaaggcagcagaatcctctgcagacttaaatgtccctgtctgacagctttgaagagagtagtggttctcccagcatgcagctggagatctgagaacggacagactgcctcctcaagtgcgtccctgacccctgagtagcctaactgggaggcaccccccagtaggggcagactgacacctcccacagccaggtactcctctgagacaaaacttccagaggagcgatcaggcagtaacatttgctgctcaccagtatctgctgttctgcagcctccgctgctgatacccaggcaaacagggtctggagtgaacctccagcaaactccaacagacctgcagctgtgggtcctgactgttagaaggaaaactaacaaacagaaaggacatccacaccaaaaccccatttatacatcaccatcatcaaagaccaaaggtagataaaagcagaaagatgaggaaaaaacagagcagaaaaactggaaactctaaaaatcagaacgcctctcctcctccaaaggaatgcagctccttaccagcaatggaacaaagctggatggagtatgactttgatgagagaagaaggcttcagacaatcaaactactctgagctaaaggaggaagtttgaacccatggcaaagaagttaaaaaccttgaaaaaaattagatgaatggctaactagaataaccaatgcagagatgtccttaaaggacctgatggagctgaaaaccaaggcacgagaactacgtgatgaatgcacaagcctcagtagctgatttgatcaactggaagaaagggtatcagtgatggaagatgaaatgaatgaaatgaagcaagaagagaagtttagagaaaaaagaataaaaagaaatgaacaaagcctccaagaaatatgggactatgcgaaaagaccaaatctacatctgattggtgtaactgaaagtgatggggagaatggaaccaagttcgaaaacactctgcaggatattatccaggagaacttccacaatctagcaaggcagggaacattcaaattcaggaaatacagagaacgccacaaagatactcctcgagaagagcaactccaagacacataattgtcagattcaccaaagttgaaatgaaggaaaaaatgttaagggcagccagagagaaaggtcaggttacccacaaagggaagcccatcagactaacagctgatcctctcagcagaaactctacaagccagaagagagtgggggccaatattcaacattcttaaagaaaagaattttcaacccagaatttcatatccagccaaactaagcttcataagtgaaggagaaataaaatcctttacagacaagcaaatgctgagagattttgtcaccaccaggcctgccctaaaagagctcctgaaggaagcattaaacatggaaaggaacaaccagtaccagccactgcaaaaacatgccaaattgtaaagaccatcaaagctaggaagaaactgcatccactaacgagcaaaataaccagctaacatcataatgacaggatcaaattcacacataacaatattaaccttaaatgtaaatgggctaaatgctccaattaaaagacacagactggcagattggataaagagtcaagacccatcagtgtgctgtattcaggaaacccatctcacgtgcagagacacacataggctcaaaataaagggatggaggaagatctaccaaacaaatggaaaacaaaaaaaggcagggattacaattctagtctctgataaaacagactttaaaccaacaaagatcaaaagagacaaagaaggccattacataatggtaaagggatcaattcaacaagaagagctaactatcctaaatatatatgcacccaatacaggagcacccagattcataaagcaagtccttagagaccaggaagagacttagactcccacacaataataatgggagactttaacactccactgtcaacattagactgatcaacgagacagaaagttaacaaggatatgcaggcattgaactcagctctgcaccaagcagacctaatagacatctacaggactctccaccccaaatcaacagaatatacattcttctcagcaccacaccacacctattccaaaattgaccacatagttggaagtaaagcactcctcagcaaatgtaaaagaacagaaattataacaaactgtctctcagaccacagtgcaatcaaactagtactcaggattaagaaactcactcaaaaccgctcaactacaaggaaactgaacaacctgctcctgaatgactactgggtacataacaaaatgaaattaagatgttctttgaaaccaacgagaacaaagacacaacataccagaatctctgggacacattcaaagcagtgtgtagagggaaatttatagcactaaatgcccacaagagaaagcaggaaagatctaaaatggacaccctaacatcacaattaaaagaactagaaaagcaagagcaaacacattcaaaagctagcagaaggcaagaaataactaagatcagagcagaactgaaggaaatagagacacaaaaaacccttcaaaaaatcaatgaatccaggagctggttttctgaaaatatcaacaaaattgatagaccactagcaagactaataaagaagaaaagagaagaatcaaatagatgcaataaaaaatgataaagggtatatcaccaccgatcccacagaaatacaaactaccatcagagaatactataaacatctctacacaaataaactagaaaatctagaagaaatggatacattcctcgacacatacaccctcccaagactaaaccaggaagaagttgaatctctgaatagaccaataagaggctctgaaattgaggcaataattaatagcttaccaaccaaaaaaagtccaggaccagatcgattcacagccaaattctaccgaggtacaaggaggagctggtaccattccttctgaaactattccaatcaatagaaaaagaggaaatcctccctaactcattttatgaggccagcaccatcctgataccaaagcctggcagagacataacaaataaagagaattttagaccaatatccctgatgaacatcgatgcaaaaatcctcagtaaaatactagcaaactgaatccagcagcacatcaaaaagctgatccaccatgatcaagtgggcttcatccctgggatgccaggctggttcaacatacgaaaatcaataaatgtaatccagcatataaacagaaccaatgacaaaaaccatattactatctcaatagatgcagaaaaggcctttgacaaaattcaacaactcttcatgctaaaaactatcaataaattaggtattgatgggacatatgtcaaaataataagaactatctatgacaaacccatagccaatatcatactgaatgggcaaaaactggaagcattccctttgaaaactggcacaagacagggatgccctctctcaccactcctattcaacatagtgttggaagttttggccagggctatcaggcagaagaaggaaataaagggtattcaggtagtcaaagatgaagtcaaattgtccctgtttgcagatgacatgattgtatatctagaaaaccccattgtctcagcccaaaatctccttaagctgataggcaacttcagcaaagtctcaggatacaaaatcaatgtacaaaaatcacaagcattcttatccacccataacagacaaacagagagccaaatcatgagtgaactcccattcacaattgcttcaaagagaataaaatacctaggaatccaacttacaagggatgtgaaggacctcttcaaggagaattacaaaccactgctcaatgaaataaaagacgatacaaacaaatggaagaacattccatgcttatgggtagaaagaatcaatattatgaaaatggccatactgccaaaggtaatttatagattcaatgccatccccatcaagctaccaatgactttcttcacagaattggaaaaaactactttaaagttcatatggaaccaaaaaagagcctgcattgccaagtcaatcctaagccaaaagaacaaagctggaggcatcatgctacctgacttcaaactacaaggctacagtaaccaaaacagcatggtactgataccaaaacagagatatagaccaatggaacagaacagaggcctcagaaataatgctgcatatctacaaccatctgatctttgacaaacctgagaaaaacaagaaatggggaaaggattccctatttaataaatggtgctgggaaaactggctagccatatgtagaaagctgaaactggatcccttccttataccttatacaaaaattaattcaaggtgattaaagacttaaatgttagacctgaaaccataaaaaccctagaagaaaatctaggcaataccattcaggacataggcatggacaaggacttcatgtctaaaacaccaaaagcaatggcaacaaaagccaaaattgacaaatgcgatctaattaaaytaaagagsttmtgcacagcmaaagaaactaccatcagagtaaacaggcagcctacagaatgggagaaaatttttgcaatctattcatctgtcaaagggctaatatccagaatmtaacagtgaactcaaacaaatttacaagaaaaaaacaaacaaccccatcaaaaagtgggtgaaggatatgaacagacacttctcaaaagaagacatttatgcaaccaaaagacacatgaaaaaatgctcatcatcactggccatcagagaaatgcaaatcaaaaccacaatgagataccatctcacaccagttagaatggcaatcattaaaaagtcaggaaacaacaggtgctggagaggatgtggagaaataggaacacttttacactgttggtgggactgtaaactagttcaaccactgtggaagtcagtgtggcgattcctcagggatctagaactagaaataccatttgacccagccatcccattactgggtatattcccaaaggattataaatcatgctgctataaagacacatgcacacatatgtttattgtggcactattcacaatagcaaacacttgaaaacaagtgaaatgcccaacaatgatagactggattaagaaaatgtggcacatatacaccatggaatactatgcagccataaaaaatgatgagttcatgtcctttgtaaggacatggatgaagctggaaaccatcattctcagcaaactatcgcaaggacaaagaaccaaacaccacatgttctcactcataggtgggaattgaacaatgagaacacatggacacgggaaggggaacatcacacactggggcctgttgtggggtggtgggaggggggagggatagcattaggaggtatacctaatgttaaatgaggagttaatgggtgcagcacaccgacatggcacatgtatacatatgtaactaacctgcatgttgtgtacatgtaccctaaaacttaaattataataaaaaaattaaaatataaaagacctgcatgcattaggtgtttgtcctaatgctctgcctcccttttccccccatcccttgacaggccctgatgtgtaatgttcccctcgctgtgtccatgtgttctcattgttcaactcccacttatgagtgagaacatgcggtatttagttttctgttcctatgttagtttgctgcggatgattatacttaaatatttttaaacaaggctttagacctaaatccatcaaaataaaccactttgcatgaaaaaaaatcatgggaccatttcagcatgttctataggtgggctgatttaaatgatttccttatacatctctttctgcttgtgctattgaataattgagaagtttgcagggggtgtggtgccttgcacagaccgagaaggaagagaaaggaagcaacacttgcaaaaggactttgttgtgtacagtgatagaatgctctacctgtgttactcattgaatcaggaggattgttgaaggaggagggctctctggaattgtaatctgaagaatgagggttattcatcaggaaaagagggcaaggcaaggggagggggaagcataggagaagaaataaaaggcccagaattctgaaaaactccatgctaaaagacccagaattccgaaaaactccatgtcagcagggtcaaaataaattttgtggaatggttacttagattgagagaaggactaatgagaaatgaaactagaggtagagtcagagatcagttaatagtcttctattttaggttaaggaattcccatttcattctgaaggtcaaggacaacttaggtaaagggcagtgactaagaaagaccaccctggtcaggctcgatggctcacccctgtaatccaagcactttgggaggctgaggcaggcagatcacttgaggttagcagttagagaccagcctgaccaatatggtgaaaccctgtctctactaaaaatacaaaaattarctgggtgtggtggtgcaagcctgtaatcccagctgctctggaggctgaggcaggagaatcacttgaaccctggaggtggaggttgcagtgagccaagattgcatcattgcactgcagcctaggtgatagagtgagactctgtctcaaaaaaatagaaagatcattctggcttttgggtggagaatagactgtccatgggcaaagtcagagtccaggaggccatgccagaagctgctgctgtactttaggcaaattctatgtggtggtggcattggtagtaagagtggagaggaatatacaagttagcgatacatttaggaggtaggttcgataaaacttggtgatttattaagtttgaaagtgaagaagagggaggagtcaggattgacttacacatgaaacatataagacttctttctgtcctaaaaaaaaaaatcaccgttgtagaaaatgatagaaactgatggacataagaaagcaatcaggatctcgattctcaatgccatgtgaagaaccacatgctcttttgacattttaagtagagatgtacatttggtttctgcagatccatttcatagctcggctatgatttcagactcattactcaaaagcaagggtgtaggatcaggggagggtgaacaagttaggcagaggaatgagctgctctgtgaggtggtttgctccacagcctttcactccttcttcccaacgtctcacagtcataaaaaaaaaaaaaaaaaaaaaaaaaagtaggagggagtgcctatatccagtagaattggagacaagttagggacagagctcagagagctgctcctgatgcggaagtggcaagaaaagacgcttcacctccctgacaacaacacatccactgtgtgtagcaatacgtttctgcctaagacaatttacccccagggaaatacaagaagggagacatctcccaggaaattaccatttgtttctactactgaaggattttcgtctatttatttgagaaaagtgagaagcttctttttgctgagaacatagtaaatgctgcaaaagcatttgatgtcatgtccattaagtaacttggctgaatttcttgaagctttaggtaccttgcttcaattcctgcatactatttactgaccctctgtaacaggacttttcaactttcaactatattagaacatgtagtttctctattaccaagttccagctgaacagtctatctttaatattcagaaagtgtttggtgtctactagccaagactgtagtctgagcaatgacattgacagtggaccttgatcttccttcctttgaagcataagtgccttgtatcattttactttcctctagtagaagtccttcctatggttatagtatttagtttctactttttgcatttaatcggagcatctttgtaatttacaatttttaaatctttttttttcaaggactaaacacgaaggtttgaagtccaacaggcaactaaagatgtatacaaaccccgcacaaatcagcctccattctaatgccattcctcttctatacttccattttttaaacctgagcatatattttgttttgagtcttttcttactcttttatttgttaatactctttattcagtttttgtcaggtaaaaatgttttgccttgccaaagaaccatctaattccttctcaggtctttttaatatattgcttccagatatttttggattggtggtttctgcaattctccctaaaacaatcttcgtttctcttacacatctcattctctacgctttggcagacttttgcagatgcattctataactgcacaaattacccttccaattttctccagctaaacaatctaatccagggtcctaaatatttttggtgccatagactcctttggcattccagaggtgcccagggattttactcaggatagtgtctttaaatgcatgtttaaaatacatcagattacaaagaatgtcaattaaattgaaaaatagcttaaatattttaataattgtgatatagtaataaatgaacttctttaggtgcattaagtaacaagatctactaacagggctaataacttattatttcagtatgtctgtggtttctattggtgacaaaaatcacaagtactgttaatatttttgttttattttgtttaaaattatttaaattttaattaataaaacatatatatgtatatttatggtgtacagcacattgctatatgtatacattgtggcatggctgaatcaaagtaattaacatatgcattagctcacatagttattttttgtggtgagactgcttaaaattcactctcctagcaatttttgactgtgtgctgcattgtttttttaactatagttagcattttgtaaatagtcctcttagaattattcccccaattgaagttgtgtgccctttcaccaacatctctgcattttctccttccaccactctctgtcctgagtaaccaccattctattctctgcttctatgagttcaactttcttagattccacatgtaagtgagattatgtggtatttgtcttctgtgcttagcttctttcacttaatgtaatggtgctgttcatattactgtggttttggtgcctacattcaaactcagtggaaattctaatttgcagttagtttttcagaaagaagaaatgtgtgaatagtttcttatggtccaagcccttggatcctctgtattttatccacagatgcttgggaggatctctagatcccagattaagaactccagctagttattagtcctttgtgctttgaaactcaaatcaaatacccatctcttccatagaactttttctaaattcactagactcacttatctacccttcttcctatagtttcattcactctctgttatgaaatatccatttattatcactattagtttttctgtattgctctcttctttgtaaatatctctatactttattctcttttatttcctttgtatccaggacagtgtctggcatatgcaggcacacaataaatacttgtttaataagtgaattaaaactctagacagcttctggtaagtttttccaggttaccagtaatacaaagacctgaatgttatttattcacttctacaaggggcacagtgtccaagtcctgacctttaataagagatgtgcttccagcagtgtcttcttggcatagtcttaaccttttattctgccctggtgcacacttaatctctcatgaagtcacagctattgatttataactgaatcttcaagatattttaatactttataaacatacaaacaacaattaattgcattgttagataaaaatgtattacagagatcaccagcacaaaaataagtatttctatttataactgaaaaaaaaactggcaatggaatattagttgtttacaaggcaagtattctgaataatgtgctgggagattataaataaccttaactaacagtaaaaaaaattgtgcttacagaaaaaaattatttgagttagtctaaatgtattaaacttatcagtaagtagcatgaattaactactattcaagtgtaaaattctacttccatattacctaattcagttccatatgaagtcagccagcaaggatcagctgaggttggctgttgtgaggtttcagccattatgaaaaagaggagctgggcacagcctctgatgaataataacatggcatgggttctgataataagcacagagaatcagaaaggaaaaaacacagagaggagtatggagaactggaacctgtggaaaatgatacacaatttttttttttctacagagtctcgctctgtcacccaggttggaatacagtggtgggatctcggctcaccacaacctctgcctcctgggttcaagcaactctcctgcatcagcctcctgagtagctgggattacaggcatgcgccaccatacccagctaatttttgtatttttagtagagacagagtttcaccatgttggccaggctggtctccaactcctgacctcaggtgatatgcctgcctcagcctcccaaagtgctgggattagaggcataagccactgcacctggccccacaggcttcacagtcagtaggcccaaaggaagtctggtgtggtcgatcaagaatccagctaattctcgcactctcactgtctctctctttctctcaccttccactgacctctcttccctcctattttgtcttgggaaaaggcaggtgattacaaaattcttctaattatgtattttaattaatataaaatctttacaaaacagtgttaataccagcccactatggtttatattttttgctgtgaaaaaaaaatctcctatgctttagcaatactttttaggcagagagtcatcaaaataaaagagtatcagtattgctgaagtaggtcattcctgctttactttaaaaaatttcaaaacgtttcatttttcctccgtaaaatttatttctatcaaggaaatggggagagaaaaattacaatgaaaaactgtgaggataaatgaggtcatatgcctatgaaatatttggaaaagaattataattatcaacttgttcatttttaataccatagttagatttctcattttaaaaggggaaggaaagaactccattacattctagggattctaggcaagataagtttccatcacagttgctggatggtggagctgggctggtatgacattctttccttgtagaacgtgcgttctaactgaagactagccctttattagaaatgcacattgagaagacaggggatttatgagtcacaaaggccaagatttctaaccttgctacatgtggggcgggacttttctatgctcccaaggacttaaggtcaagtcactttcttcctgttcccgtctccttctgtcttcctctcttttttggttctaaccagaaaatgtattccaatttttcttttctttttctgttcaagtcttacagctctgccaaaggcaaaatgctgcagggattagaaagatgaagcagctaagtcaaatcgatagtgacagccagtgaacgcatgtaaatttcaacaagtgaacgttcagcattgtctctggggcctcccaccaatattaacatcactaaattttctgatttaacattctcacaaaacaggaatcaaccaaccaagtgccagccactaatagccttcaggttaataaatttggtcttcattaatctcaaattagagtcctggagtagacttatgtttgggataggagtgcccatcctacaagaagcttattacccataaatcaggtaagagataagaaaacactcctccaggtctcattagccacttcagataggctctgcagctctttaatgttcaggtggcatgtccttagaagatgagctgagaatcaaagctcctgatacaggaagaagcctaactcagcccatctctcttcttggggcattcacaattatttcctttaacccttgtgtagtttcagttgtgttgattcaagtcattattttcttacacaactagggtatatagtttagaatgtgatagaatcttggaaaaatagcaattccccattatgtatacacacaatacacatacacacacacagtactatatatgtatgtgtgtgtgtgtgtatatatagatcacgtaaatatatatgatatatatagatatatagagagagtacatgtacatatatgtgtataatatattcttcactttcattttatttgtctttatgatttcaggcagtggtataagaagatagaaatagcatatgagcacttcacacagtatctgctataaaagtttattttgacactttacttataactccttgaaagtgataaaattttcctattttcctgaaggtacatttagacaaaaatctcagagcctaatattttgaagtgttagttttgctgaggccaaacaaaatcaaggcccagcatataccccgaatacattctcacttaccataaatttattatgaaatggtattgtgttgataggagagtttttgttacagcctataacatttcagggattttgatagacatgatttccaatgggataacatttaaactgagatagctactatttttttttaatatatgtttagttttgtgaaaaaaaaaataaggaaagcatctggtgattgaacaaatatgtagtagagctaaagacattttccttaaaagaaatatacttgttttatgctttaatggttagagctgttccattatagtgtatcatctatactcttctgatttttattacaagtagggatacaacttaaagatttaaaagtccttcccaaagtataagcatgtgtttaattttcagaatggcagtgagacttacttgcacataaagttaagatacctaggttgtgggcttccaaggatacttccttgggaagtctttagaagttgtttttagttaaggacttggtagcatcaagggaagccatgagtggtgaaattctcagagagactcttctttctgtggtcctgccttgtagatgacattctggagacttttgtgtgtaaatgaatgattgaaattccatagtatatttgtcatttttcctaagcctgtttactctggggaaaatcttctttcatccttctaagttcttactccacactcccgtgggtgctcatgcatgtgtgcatgcgtacacacacaaacacacacaaatatgcatgcacacatcttcagtacttgaggcattaacctgcagaaccataacaccgtgaatatagcagtaaaggcaattatttctgtaaacaggtaacagggtgtattaatattactgttagtacctctgaattctttcttccttaataggatgtattaatattaccgttattacctctgaattctttcttccttcccatcatgctagagccatcttgaatatgacttaagaagtgatctttacattttgcctctgtctcaaactaggttctagtggctattaggggctagaccaaagctaaactgagaataaggttacgatagcacaattgttcataggtggtctctcaagacaacagcattgcaaaagaaggaataattgttatgtttattttacctatgggggaaaaacagtagtccgggcagtctaaatgatgtgtccaccatcatagaataatagagagtgaagctgtaagtataattccggttgactttgtatccagtaaaatgttcattcaacttttgttcatctctcctctagtcacactttgtcatgcattgacttcttggcctgatctcaccagtgaaaacccatgggaacagttaataattccatgactaaggctattataatcctatagctacagtttctccagtgaaataatgaaaatttcttcattaatttattataaaagttactgagtttaattgtatgccatcctggatttcttacagaagtgattcttgataatcctaagaaaattcttcttcagacagattttcaaaatgtttttgtctctgcaattactgttctgaggttagatcttatagaagttactccataagaagccaaagcattttcctcaaagtatagtggctaatggctatgctgttaccaaaagctgtgacagaaaacctctggctattaaactcatatctaatgctatttggcctagctattatgtacaatttgagaaactgatttttctcttctaaaatgaaacacaaggccgtgtgcggtggctcacgcctgtaatcccaacactttgggaggctgaggtgggtggtaatgaggtcaggggatcgagaccatcctggctaacacagtgaaaccccatttcactaaaaatacaaaaattagccaggcgtgatggtgggcccctgtagtccctgctactcaggaggctgaggcaggagaatggcgttaacccagctggcggagtttgcagtaagccgagatggcgccactgccctccagcctgggtgacagagcgagactccgtctcaaaaaaaaaaaaaaaagaaaaaagaaagaaaaagaaaaaaaaagaaagaaagaaatgattcgcattgtagggtcatgaatttcaacacatattacagttcagccccttctctgctgctggtggcacactggagatgtggagatgcagattctcaccacacaaagtggggtccgtcctggaagcttgtaagaaaagcagaatctcaggccctacctagaacctactgaattagaatctgtgttttaacaagatctcttggagattcagaggtacagtaaagtttgagaagcacagctggaaactgtctgaagtctgctatgatcatcttaatcttgggagctgacttagcacagtttctgcctctcccagcccagcctctctgccctatttaggctacttctggagagttccacagtcagaaccttagctatttctgtgcctggtctttaccacacacaggtccaaagatgcccaggaaagctaaatcatagacttccccctactgagcatgttgggctgcctgcagtctctccctttatcataggttggccctctttccacattgccatgcagctttgaatgactgaatgttcaaatttttcacagtgttttcattgcttaacaggacatccatggctgtaatttttcagtgaagcatagaatgtgttaattaaagtggcaatggaattgggacaggttgaatattaaatgtcacttctattgtgaataccatcatgctcttaacatttttattttgttttcatgaagacttagtaagggttaaaagtgggcgcattagtgagctggtatttgcctgcccaccaatgctgattttgatttccatggcgtagttctttggggtcagcatgcatggtgtgttaaatgttaccggggacctgaggaataggagagccctttccttatgacacttaatcctgaattatttatctaaataattaagggcaagcatttttaacttcgttaacctatagtttctgaataaaagagttattgagagctctgactcaaggacaaatgacaaaagatgatccctggagtcagggcatcaccctccataagtctcactggaggtttgcttcctgcacaaggagacatgtctgtgatttgtgaagcattcatcttgtttcacaagactttatgctgcacttaggctaaagtcactgccgaataagtcacttcactatcaagaaagaaggggatggcttttctgggggagcagaggcatattaaggtagaggaggggtggcgcaaagcagtccagccaagaaaaaaaaaaaatcttactaacaggcttagaattaccagcacatgttgatagcagaaagcagattggcttttagccagttttattcttgtttttaaatctctaaagacaacgtacccacttagtgcctgcacttggggcaacatgctcccactcccacctcctccttggtatgccagtgcagaggagtttgttcacacatttaagatattacataaaatacatctctgaaggtcgacactctcagggaagagcaagaaatgactggagcatcttagctgcaagataatgtcttattcagatatctttactctaggattatagattttttttttttttgagatgaagtctcactggatttcccaggctggagtgcaatggtgtgctcttggctcactgtaacctccacctcccaggttcaagctattctcctgcctcagcctcctcagccgctgggattacaggcattcaccaccatgtccagttaatttttgtattattagtagagacagggtttcaccatggtggccaggcttgtctcaaactcctgacctcaagtgatccacctgcctcagcctcccaaagagctgggattacaggcgtgaaccactacgcccagctggattatagattttgacactcagattactttggctggtctagtaggcaaataatgacaagacatgctcctgccaaagatgtccatggcctaatctccagaacctgtgagaatatgctacattgcatggcgaaggggaagggagactgcagatggaattaaaatagctaatcagcagataggaagatcatcctggtttatccatgtggacccaatgtattccaaggagtctttaaaagtggaagagggaggcagaagaagagagacagagtaagatgtgactaaggaagaatggttaaagaaatgtcgctggtatcagagacaagaggaggaggccgtgtgcttcctcttcatgtgggctatgcatattctcactcataggtgggacttgaacaatgagaacacatggacacaggaaggggaacatcacactctggggactgttgtggggtggggggaggaggagggatagcattaggagatatacctaatgctaaatgatgagttaatgggtgcagcacaccagcatggcacatgtatacatatgtaactaacctgcacattgtgcatatataccctaaaacttaaagtataataataataaaattaaaaaaaagtcaaggaagtgaattagaggtccctagaacctccaaaaagtaatgcaaccctggatggcatcttgatattagcctggggagacctgtgtcaaacttctatcctgtagaactgtaagataacctgtgtttttcttgtaaaagatttcaacatttgctttagattcagggggttacatgtacaggtttgttacatggcatcacctagatagtgagctagtacccagtaggtagttttcctgcttttgcccccttccgtcttccccctcagtagtccccagtgtctgttgttcccatctttatgttcatgtgtatccaatgtttagctcccacttataagtgagaacgtgtagtatttgattttctgtttctgtgttaatttgcttatcaacctgtgtttttaagcctttatggtaattacttatggagcaatagaaaactagcacaatagataaagtcaaaattggtatggtatgtagaacctaacagagcacggtcctggctccacatctgattagtaatgtgcaattggtaaatttctttagccttattatccttatctgtagaatggacataataatatttaccttatggggttaagagagaatgaaataagaaagcaactataaaatgtctgggataatgcctatcagggtggggctgcccaaagatactaaatttgattttatttctttcctcttatacaatttggtggccctcttagtgagtggccccatatcgttaaggcttactgctaactggcccccctgagtccttagaaatatcaccacatttattgatatttcactgtgttcctctgagaacctcatttggccatatagtcttctaccaatcactggagttttcattagtgctagattggcattagacacatggttatagaaggatctagtagattattattttgtaggagacatcatcagtgctcatgttaaatgaatgatacattctgttgaattataaactgcctctcctacacctttgtctttgtacatttcagtccttcttctctattcaaaactgacgaagtaaatcagttgggaagaatacagtaatttatttgaataaacatttgtcaacattgtttaggaaaataagttacaaattgactgtatcgtcatgttcctgcactaagaaagcattaggagtctgcctaaatccttttatcaaaatgtattattattattattattattattaatttttttctatttactctttcttttttaaaaaattgctctcctctagatattttttctgccactctttataataaaggagacaatatttctaactgcccaacagacttcaagatgatcttgacagcctctgtagccaaattatcatattaatttgatctcagcaacacttctggttcactctgttctgtactcaaatccaaatcctgagctttttcttgagcaaataaaggcaacagctgtgaggtcccagttcatctttccggttttacccatacaacaacaggctgtgcaaagttgtgagcaattcacacatagtgctctcaactctatttttattaagtactctgaagagcaagcaatcttcaaactcctataaaatttcatgaccaaaacagctatcgggatggtgtttcccttgaaatgtctctatgagtacagtcatttattattctaggcttcctgataatccttattagtggataccagaactgtgattttaccgtatttgcaacctaatgagtaagtctaccacatgaatgctggcagaagatacaagattcctgggtcagagatgaaggatagtttattgctacaggatagcagaataccagcatttatgccagtccctaaaatttaagtcccatggggcaaagggaagagggccagacaatgcctgcagatgtaataggggagagttgagtttagggtacccccaaattttataataggcagtactttggtccagataaagacatgttttttatactggatagtagacaaacatccatttgctccagttggagacaatacttctgtcttcccatagatgttcactgtgcaaacaattcttgaaacaattgcctggaacaaagttatcagttattagattttttttttttttgagttggagtctcactctgtcacccaggctaaagtgcagtggcatgatctcagctcactgcaacctctggctcatggattcaagagattcttctgcctcagcctcctgagtagttgggattacaggcacccaccaccatgcctggctagtttttgtatttttagcagggacagggtttcaccatgttggccaggctcgaactcctaacctcaagtgattctcctgccttggcctcccaaagtgctgggattacaggcatgagccaccacacctggcccaaagttattagatcttctgttcacaagatacacagaaatgtgagaggccataacaagttgtcaccctacaatgagtttcttagatgtaaatcgactcttcccttcctatgttggtaagaattgtgccatatgaaacatcatcataggcatatgtaatgttaagcttttttgccgtaagagaaaatttttccttgcttccttagcagaatacaggcttcagttatgtgatcaacctgtttggatctgctaggttaaactataaatgcatttttaaaaatactacagatatttcactggacaggaaatggggatggggaagacagaggagagagtgtatggcctggtaacaaagcattaccctttctgttgcacactgctgcccattttaatgttggccagcagccaggacaaagagccaaggcagctccaaaggatctcagagttggaggcaagagagagtcaaggaagctcccacatgctgaaatgtcaaacctaagcagacctggcctcagagtacaacacaatcagatcttccaccatcagagtcattgatagccacactggctcccttgctgtttctggagcacagcagacatggacccacttcaggtcctttctgctggctctggtctgtcataggtacactccttcacctgatcacccagggatcgctttcttatttccttcaagccttcttcatccaagtactgaccaggcctcacactgcttagcttccgagatcagctgagatcaagcacgttcagggtgataaattagttcaatcactgtggaaagtagtttggtgatttctcaaagaacttaacacagaacaagcattcaacctagcagtctcattactgggtatatatccaaaaaagcacagattgttctaccaaaaagatacatgcactcacatgctcatcatagcactattcactataacaaagacatgaaatccacctagatgcccatcaacagtggataggtatacatatgatacgtatacaccatgtaatactacgcagccatacaaaaggtatgaaatcatgtcctttgcagcaacatgaatgtagttaggggccattgtcctaagtaaatcaatgtaggaagagaaaaccgtatgccacgtgttctcacttttaagtgggcacaaaacattgggtacccatggacgtaaagatgggaacaatagacactggggactactagatgcaggaaggtgggaggggtgaaaaagctaactattgggtaccatgctcggtagttgggtaatgggattatttgtatcccaaacctaagcatcacataacataaccaagtagcaaccctgcacatgtaccaatgaatctagaattaaacttgaaaaaaataagtaagtaaaacataaaacatatagatttttaaaaggcatcttcaaatgtcaccttgtagtgccccaccctgaattgtagtcacctacacacataaactcacacacaaacacacactcccatacacacatcaaaacattcaatacacctaccttactctatttttttttctgacttccaacatagtacatcatttatttaacaagaacgtaagctcaacggggaggaattgttctctgtttattttctgatgtttcctaggtacctagatcagtgcctggtgcatatataaatgaatattttgagtgaatatttgtggaatcatgaatgaatgaactgatgaatgttaatattggtatttttcattgttatttgtcttattcctaggaagacaggactagtcatttgaggtactttttcagaacagccagggctggggaggatcctttatttgtgggtgttaaataatagcaagtgaacacagtgcagcagtagtgaccctgttgatgatgataatgaatcacattgatatagtgcttttctttttctacctttgtgtgtgtgtgtgtgtgtgtgtgtgtaattctcctcagtgtcagggtgatagattatgcccattccttctaggaaaatggttattccatcttaatgcaggcttttagaaatgaaaaataatgcctgctacaatcaacttttaattatctacactaatggagtgctgatgctaaagaaataatccccaagtcatttacatttgactttaggatgcaaccgagggcttgtattcagaaaagcacgttaaaccatcgtcagcagcatgtgattgcagaacaaattctggcctgggagttgggaaactggatttggtagaggctcggtgttatgggttgaattgtgatgccgcccccctgccaaaaagatacgttagaatcccagcccccggtaactcagaatagaaccttatttggaggtagtgtcttgacaaaggtaattaagttaaaatgaagttgtttgggtggaatctaatccaatatgactggtatttttatagaaaggggaaatttagactgagacagagacatgcatacagggaagaatgccatgtgatgcctggaattatgctgccacaagccaaggagctactgcaagttagcaggaaggcctgggacaggcccttctctagcacctgcagaggaagcagccctgtggacaccttgatctcaaacttccagggcagtaagacaaccatgtctgtggtttaagctaccccattcatgggactttgttatgacagcccttggaattgaatatgcttggtgactcaactcttatgtgctcatctagcatacagttccctctcatctccaagcctccgtttcctcatccctaaaatagaatccaaagcccctagctgtttaagggctctataattagaaagcttctgacagaaagtccccatcagctcctcccagtttagcagtaaacccatccacctaggtgtcctctaaattaggtaagtgaccctagaagaaagttccacacatcatctgaaccgcggataaaatgcatgcagaaatgactttattcaaattcaagagtttacattttacttaactctggaaaactcagagtttaaacattttcacatttttttttaaatagcaagaatggcatgccacatcatgatgattcagctctcatctctatttctctaggcagaatgcatttacacatcatccaatcccaccctatttccatgtactattagcagaagcaaatatcagccttcttcaggccctggcaggataaaaattcagcccagtagacactgggaggacaagaatgaggatgtgacttacattccccagggccatggcattcaaaaccaccatacccactgaatgtgcttctctatcgctttgtttaatatttggagagtagtgtttgctccaaaacttgtaaaaagtgagaccaatggaaaccattggtccaaagcaatcttacctgagaaacattttaaaaagaagtctttcccttatgattcctcttcttactctacttttttgaataaagagattaatacccaaccgatgactactgcaaggatgaaggttattctttaggagaaaaaaaaattgtaacatacatttttatgaaaaaaagatttctaaatatgctgataaaatcactgacatctcagtaaatatagtttattcctaggaagtgactagaatgattgatttagctatatgtaagttatttaatactgtttgaaaggtacttcatcaacaccatttactgtgatcaatagcattttcaggaacacttcagacttggggaggttactcctttgggtaaccttttaggattatctgttgtgggaacaagaagtagccatcaaaagccactgagcaggctgggtgctataatcccagcattttgggaggctgaagtgggaggactgcttgaacccaggggtttgagaccagcctggacaacatggtgagatcccctatctacaaaaactatattaaaaaaatttagcttgttgtagtgtacacacctattgtcccagttgctcaggaggctggggtgggagaatcacttgaccccaggaggtcaaggctgcagttagcattgcttgtgccactgcagtccagcctaggtgaaagagtgagaccctgtctcaaaaaaaaaaaaaaaatgtccctctaagcagttaaaataggtcaacatcaaagctcatggttctggctcttagtcaaagcctatttatatctgacataattctcatatattgcatatattgacctgtttggtttactaatccacattagaggccaacagtatagaaccagaatcagaaaatctattaaaaggaaatgaaagaataaaaaagcatggcaatatcaggccattaggtgtgggtacaaataatctcccaaaccacagtagtctctgagtgtttcactgacaaagtttagttatcgataattataattatgaccttgaaatcctagcgtagacattgaatactatgtttggaagtcagggaattgtttaatatatttaagaaagatattcccttcaaagcagttcaagtggtcttagtattgccagttaaggaagtgggttacaggatcctggaatgactcagtgatatagaaaggctcagtccctggcaatgtcagatgagtgaagaggttgatgcaaaagtaattgtgatttttgccattacttttaaatgtaaagtacaggcactaacatagtattagttactaatagtattagttatttagtaaattacttttgtactaacctaatactatgttagtgcctgtacaaataatgtgcagtaaaaacaatgagtgtgtgtgtgtgtgtgtgtgtgtgtgtgtgtgtattggaaagcagttgatctgtacacatacttacagtttactaaacaaatgtttgagtgcctactgtgtgtcttgctttggctgtgctctagacagtcatgataacagagatccctggtctggggaggtcccactctcagagcaattacggaagaagggtagaggaaatcatgcaagtatgtagggataggctgatgagagcggaagcatgagggctgagagctgcaggctgtcttcccactagtcagggaaggctttctgattaaagaaaattttcatcacctatgcttagaagtttagactcagaataactgatggcaaatggaaaagatgaaataaactaggatgagaagacaagactgcccaattcacacaatgaatccagtctctgaatcagtcgggtgctagccaaagcagaaatatttccagcagagccctgggaacagagaaggaggcagtttttattaaagtcttagtttccaaatgatggatgccaacaagaaaatagtttaaaattccaagagaagccttcacctttcattccattgtagagtaatggctttttcaaacacattcaaataaagccagggttgttaagtagtatgtctcaatcaacatactcaaagtctgtgaaccaaaggcatagtcttaggcttcctcttatagtctagcatgatattattctatttcatctttttttatatgtttgctcccttgagtgttttagaatgagactgctagattttatgtttctaaagctggttttctaccaggcctgttytcagaacattctttttttttttttttttttttttttttttttttwaagatagagtcttactctgtcacccargctggagtgcagtggcgcgatcttggctcactgcaaccttcgcctcccgggttcaaacgattctcctgcctcagcctcctgagtagctggaattacaggcgcccaccactaaccccatctaatttttgtattttttagtacaaaatgggatttcgccataatggccaggctggtctcaaacacctgacctcaggtgatctgcccgcctcggcctcccaaagtgctgggattacaagcatgagccaccacgcccagcctagaacattctttcttggaaaggaagaacatcacagccttctgtgcattctcttgttcacccacataggcaaggtgatgtgtttgcagccttctttttaccctcacctctgggaggtggccttggctcatcacctattgtttcatgctctctcttaaaggctgatttggtgactgaattcatcattgctgcctacacacccatggggctagcctgggcaaaatgtgcctcgtaggttgcctgaccttttgccttttggcaacgtttatcacctctgaggattcagcttctttcgtcagaaagtgagaacttggatcaggtcatctctaaggttcctttcagttttaacctttcagaagtcacacaaccataaacatttggtgtacctagactgttggcttattgtccgactttaagccagtcatttcagttaaacaaacaaaaatgggggcttgccagagtcaagtcatacaagactgctttcctaatatttggtgcttcttaaatgaagttgttatttatgcatccctcaatcccctccctcttctgcatattttgaacttgcaaagccttctgatattttaagcagaaggttgcaaatgcttgtcctactgcctggccaagtcttaggtaaaaattgtcacctaaccacatcctcagatcatttcccctgtactctagatcactaagcgcatgtgcacacacacgcatgcacgcgcrcacacacacacacacaccatccaggatcctcctgaggatgaatgaatattcctgggccaaatattgcatgaggatttgggcaatgttttggctagttgaacaacaacaatgctcatatttatgccaattggcaggaccattgcttgatcatcctgtacttggtgaagggcattttttattgtttccttttttgtttgtttgtttgtttgttttgtgaggcagaatatcaccctgtcccacagactggagtacaatggcatgatcttggctcactgcaacctctgcctcctgggtcctagcaattctcctgcctcagcctctcgagtagctgggattacaggtgcccaccaccacatcgggctaatttttgtatttttagttgagacagggtttcgccatgttggtcaggctggtctcgaactcctgacctcaggtaatccacctgcctcggcctcccaaagtgctgggattacaggtgtgagccaccatgcctggcccaagggcattgttttctaatccagataactaagctatccttagggtgatatgtaatgcagcaattgctagaaaatgacatgttttcataatggatctttctccaccatctagaaatttaggtaaagttgaaagaaaggataggaggaaccatttactgtgcacctactttcttcctgagattttatacatgtcatttgatgtttacaccaagtttttgaggtcaatctcatatccaaagctctaatcaattaactttaaattagttaatgacagggctctcttattcttaaacctgtcatttcccctaaactatgttgttttcctaaagtgagattaaaagtttgaaaacaaaggaacaaaatgttcatttatttactacgtttctgaaaacttgcatatatcttaatatatatatatatcttatttatatgtcttatttcattgttatgaaaacckagctttctttccttctatcctttcaatattatgctacttgtatttagtatttacattgtatgattcaaaatattgttcactgcagagccaagtagtagactatgaccgctctgcttattttgaacaatcttttatttttttctggagttgataattgcttcagatttttgtctggctttttataagcctgttgataatttcctgtttattctaatgtctgtcatatgcctatccatggagttaacctagtttcattttgtttttcatggccacatctttatcctcctttctgtgggggccctcagcttctgctttaattccagctagatactttctgctttcattcccgctatatactctaattccagctagatactttctgctttcattcctgctatatactttaattccagctagatactttctatgtgggctgcaaaggtgtagccctgatacttttctcatctatcatcctgagacttcatcttacaattaccctgttttccaaatctcatgccttctacttccttcctttactctccatttagaatatttttcagcagcttctaaattagcctacataagacataaactcttagatcttacttgtctgaaatgtctttcacatatgattggtatttgagctaaacataaattagagattgaaagtcatttctcttcagaattttgaagacttctctactctttttctttctgctgttgtttttgagaagtccaataacatatttctaatcctttgtattttgtttcctctctgaaaactacttagatattcttttattacaaatattctaaaatttagtaatttttaaaattctctcattgttttaaactttttttttgagtggagtttcactctttttgcccatgctggagtgcaatgacacgatcttagttcactgcaacctccgcctcctgggttcatgtgattctactgcctcagcctcctgagtagctgggattacaggtgcgcaccatcatgcccaactaattttgtattttttgtagakacaggatttcaccatgttggccaggctggtctcaaactcctgacctcagatgatctgcccgtctcagcctcccaaagggctgggattacaggcattagccactgcacccggcctgttttaaacatttaatggactcaccagggaattttcttgtcttattactttgataatttcctccactccattttccctctaatatttttactttcggggattcctatgagtttgacattggttcttctggactaatgtttcctctagtgttttttgaagatgtctttttggattaaattctagaaaccgcctcaactttatatttcattgttgctcttgatggttttaatgcagatactgaatttccaagagtgctttagttgttctcttagtgttcatttcatagagcacgttgttctcctttaagaggtcatatcttctctttaacttccaggatttttttaaccgttttgtctgttctttatattatgttacttttctctcatttgctccacttcctccccaccccacccctgtttatttagatctcttcctttcatagtgaaggttcttctcaattcactagctacctcaactgtccctttgtatttgagaacaaggcattgagaagcattattttggaagctctgtgtgcatgaccaggacttgtcaaagactggagcttatcacaaggggatcagatagaaagctgtcttttctataagaggcattcccaatgttagtgtctgcaggccttctagaactggaagcagaaagtccctcctcggcatgtagagtctcactcattcccgtttgcattccatcacctccctgccctgagccctttgcacttgtggtacatgttgtttgaagtatgatgcttcattgattagattccttcaggggtaaaatctccattctcgtgtggggaaggtgatactttaagtcacctggctgtgcagcaacagagagggaccaggtagtctaataacaccttatgcagacttccaactcttgtttctcactataccttattctataaacttctggggaaacggctttctttgaattctgagcctttcttaggtatatttcaggccaacttacttgtaccttgtccatacacttgtcaactggcacccaagttcaggcagtctccattttaatcaatcagctgctgctcatccacctttcattttatcttccaaaatattgttataattcttatgcattggttagcttcttttctttaactttgtccttgtggattactactcattttggtcttttattgttactttagtggcatttcaggaggaaatggaatggaagtgtgaggtcaatgcagcatatcaaccagaatctagcctgaattgcaactgtctcacaataggtgccggactctgcagttatggttctagatagtacaaaatttcctctctcttatgagaaatatgaaatcatttaaagcagttaccttttctaaacaattccatggactctgagtcaaaataatttggcaatcatttattccaacctctcctggatgcctaaactatatccctaagaggtgattttacaatcttgaattgaatctctccagtgataaggaatttacttacacatgaaatgattcattacattttcaagtcatgttgtggtaagagttagagtgcttctaagtatctttgttaactcctaaaatctgagtcttacaaataactgacttatcaagttgtaaaaagtaaagagaaaatccccatttctcctactttaaatagaccgtagaaaataatgatgtccaaatttgtcaaatacgtcaaactcaactgcatataggaccattggtgtacttataatccaagaagtgccaacacaaccatatggcatcagttgaagggacctcaagaagttaatgtggatttcacagtggcaaggctgatggctttagtcttgctgaaagttctgcttgtttgatgagaaatatttatataatattttcagaggcttatttcttgtatgtaaactctcagatgtgaaagggaattcatttgctgcatattgattagctcgttgagtgttaatttctcatggttgtggtctgcatgagagaactacaatcagctagagtcaaagaaaagtggatgcttccaccagctgatttttattttatttttatttataatatggaacactactgtaaaagaatctttgcctgtctttccactttataattataaagaaaaggaaaaaaagaggttagagggcccttcaaggtactttaaaatgtttttttcttagcaattcaaaatgtcctagtgaaacgggagagttccctgactcccttcacaggacttgtgacaggggtgtcttgtttatttggcctcagtgctcaaaccccttatgggatggggaacatgcaggtgcacaggagcagaagccagggtgagtgcttttgggctccagccccacagtggtgtctaggggtgttacaatgctcttttagccctgccatctggagatggcttaagtgttaaacagctcagtgaaaagtcagtgtgacagccttttggggttcccatacccagtgtgtcctgaattcttgttcagtgtccatgaagaatgaggtcatacagacctgaaggctggtgaatgtggggattttgttgagtgatggaggtggctctcagcaggaaggggaacgggagaggggacggagtgggaagatgatcttcccctgtagttcatcggtcccgtagctgatttcctctctgtccacagctaaactcctcttgaccttcagacacttcctctcttccctcctctgctgcactgctctgctgctctgccactcttctgcttgtggagcctggatattggggtttatatggatgggcacacgatagggggttgcagtgggtcaaaaggcaacatttgggtgcaaaaacaggaatgcctgttctcacttagggctgcaggtctacgcttgagggtggaaccctcgccaggaactcttttgcctcctgtccatatcactaggaagaccattgatgtgtttgatctttgtaaaactacatatgactctcaagttgcaagtgatactgtggttcagcttatcaaatactggaatttggcttctgtcactgactctgccactggctttgtggtcctgaacgcagccctgatgtcagatgtgttggtaatcttggggaactttaagcaagccagctttttttttttttttttttttttttaggactagatggaggtaagggaaagtgtgagacaataaaactggcaaccagaaacagaagaagaaaggaagagagaaaggaatctacggagtgtggaagttttaggagtaaatttctatataagttgcaaaattttagtaattctttagttcttatttcatttattcacttattttttttttcttttkagacagagcctcactttgtctggagtgcagtggtgcaatcttggctcatgcaacctctgtctcccagcttcaagcagttctcctgcctcagcctccccagtagctgggactacaggcaccagctaactttttttatttttagtagagatgggatttcaccgggttggccaggctggtctcgaactcctgacctcaagtgatccaccttccttgtcttcccaaagtgctgagattatagacgtgagccaccacacccagcctcattcattcatttattcattcaacaagtattaattgtgtgcctactataggccaagtgtattttgggccaagtgcatttctatgagctaaggatatagcagggaataaaacagttacctccatcctcatggcacttacattcatgtacctgcaatccccatcagaatcagcaactaggaagagatgatatcagagcttgaacgtggatccagtaatacccatggatagttctgtggaagtaccacagagaaaaattcaaaggaaagaggaataggatatattgagatacaaaaagtgtagcaatggaaaatcaggtgatcagattattgagaatgaaatatctttagtaaagatttgaaggagttgagtagagatatctcctagatatctacacctacatagaagatcatgccaagaggaggagcagcatgttcaaaggagagaatgggtatgacatgtttgaagaatagtcagtagtttggtatggctacagctgactcagtgagatgggaatgaggtcagaaagatgaggaaagggcagtccagattgtgttgggctttgcttgcaaaaacttcagctcttacttggtataagacagcaaaccattgaaagagtttgtgtagaggagtgacatgatctgacttcttttttaacaagatggctcttattgtatcattaacagcatggttttacatgaacctatcgttttgtttagtttgtgggtcaggactgaacaatgaaagtagaagcagtcctgtgacagtggcactaattacatttattgtcatagagaaagctcatgccagtcacatactagtcagaggagttttcagtcctaattgccacagaacaaatgactttggatgttaaatggactatagtcccctcatttgcaaagtggggatagtagtatctatatagtgaattatgagaagtaaatgagaaataacatttgtgaaaatgtctgacaaaatgcctgaggtgttaacggatcttttaaaatgttaactgtagcctcaatggattgtaagaatatacacatttaaacccattgacataaattatggctagaatgaaagttttgatcatcttgatgatagtttttgtcttttgggtttctttcttgtgtgttctatctgaagaaaatcatctgaaatccctcatttagaaattgaaatattttatgtcagcaagcacatatgttaatgatttcctgaatcagaaatgtgttcaaaatcatatctatagcaatgatcaccacagcggtagttctattagggaaaatacacgaaaacaaatataaaacaataacaaattaagtaactaattaaataatgtgtggcatggaaataaatgaaatactgtgcaaccttcgaacaccattttatagaacaaataatcattggagaagtagacgtgatatgttgttaagtaaacatatcatataaatggcttagaggcttagagatgtrtaggaaaggaaatactctaaaatgttaacaagaatggtatctctggtgcaattaaaagtctttttaatttggatgggtttttttatattttacaaatatttctgcattgattctacattacttatgtaatcaaaggtgcccaatacgtgttacttaaagaatctcttcaataattagaacgtaggcactcaatgctcatttttttccccagtgattctctgaacgtgtgttactaccatccaggagcagaactatatcttgctgagacatttgtgataatgacaaaacgtttcaatcagaaatttgagataaggatatataaatgattttttctcatgagaaataaaacgcaggtgtgttcaccaaaatcctgctcttttactcaatccccttggccaaaagtaagcacgacctctctggcattgtgaacaaaaagaggaattaactcaaaaagactaattttatgcattagatgatcctttagaataatcaagcatatgagtattagggtaacttatcctttttacttttcctgagggaggtaagagtagcaccgacttgctactgctaaagatatggactattggcctgggagggtaagcattttctgtctgatttaattaagaccactacctgctgacaaggctttgagaaagaaacaaaaataaggaatgcacaaataaaatgtaatgcaggtcaggcatggtggctgatgcctaagtgggaggcttaggcaggtaatcacttgaggccagaagtttgagaccaggctgggcagcacaccaagaccatctctctacaaaaaaaaaaaaaaaaatacaaattagccatgtgtggtgatggatgtctgttgtccagctagtcaggaggctgaggtgggagaatcccttgaggccagttcaaggttacaatgagctatgatcatgccactgcactccagcctgaacaacagaatgagaccctgtctcattcaattctttaaaaatctaatgcaaaaacattagaactgaaactagaaccagttttattggaagatgatggaaaagcaccttgtgatttatctcttttggtagcagagagctcatgatcgtccatctaactcccacaccatcttggagagccacagggtatcctacattatcctgctgaagatccttcagtacctaatggctctcgtgaagcattccaaagtgaaagtcatggagcctatgccactaaatcagatataactagatacatgttggattaaaaggaaaggaggaaaggcatakaagggaaaaacagagattattggagaccaaatacctctataaattctcaaaatttgtttaaaggctttactttttcaagatgcatattttggcaatagcttacgaagactgaagttttcttatttaatcttagagatactaatacttagaaaagaaaagtcttctatcttgttgaccttctctgtagccatttgaaatcttcattatcagaataatgcccctccatgtccacaattattaatttttatagatttagggggtacaagtgcagtttcattacatggatgtattgtgtaatggtgaagtctcggctttttgtgtagccatcacctgaatatagtgtacattgtacgcattaagtaattcctcatccctttcccacaacctccacccttctgagtctccagtgtctataattccactttctgtgtccacgtgtacacgttatttagcagccacttataagtgagaacatgcagtatttgactttctgtttctgagttattcatgaccagaattattattctaattattgtgaaataaaaattatgcctgactaaaatgactgaatccagaacttcaccataatccatctatctcctccgtgagtcagtgcatattacctattccaatgacctcttcagtactgtaaatattactgtgttccttttatttacttaataaatagatgtcaaatgtgtggaaaacaacatttgttttttcaaatacatgtttataacaccctttggaggaagtaagcctctagaacatgacagtctctggggtatgctattttcaggtaattttaaatgtcgctttccaacaaaaatgcaatactattatctttttttttaatgacaaagaaaagcaaaacaagtattatattggtgcaaaagtaatgcagtttctgccatttctcttaatgccattactcgtaagggcagaaatgaccattacttttgcatcaacctaatacctccagattttagatatttgagtgccattgcttgatatatcttttgttttttcttctggaaattttggttactttagttgcataaaggatgacttccattwtaccctgttaagcatctctgtctggtcagaagctactactctgttctttctagttcagtagggaacaatcagtttccttctcaattttcagctaatctttatgaatgaaatttgattaaatctagcaaaactatgcaaacatcataacagcatatggggagccttcctgtagtaccagtgggctatttccgtctaataacagattcaaaaaatccaattagacagtttgaaaaaagaaagccagagttaaaaatatctgactgtttgactgagaacagcagggaatggtttataggccaatcatttatggtgaataggatcttagtggtgagcaactcacatctctagcccattagaataatktgttactcatattgctcctaaagctttctacttaattataccaagttaaatagcagacattctcactcccttttgatggaaaatcacatttattcacccacacaataccatccttgggtgttaagggatgagagttgacctaatgggaagacaaacaaatggtttaggaaatgagacatgatttttttacacaaaggttaatgcacgagaaaagaaatgcctaggtctctgtctaatgtctatgtgttctcatcgaataattcttaaatgaccctatttagtttgattttctaactacattagaaatatatgaaacaattaagaaatcattttttacctgtcatatggcagatggactaacattgatcagggcagtcgaggaggttgtaaggaaatgggtactctcaaacattgctggtgggactatgaagtgttttaattttttttttttttttagacggaggtttgctcttgttgtccaggctggagtgaaatggcgtgatctcggctcactgcatcctctgcctcagcctcccgagtagctggaattacaggcaccctccaccatgcccagctaatttttgtattttcagtagagacagggtttcaccatgttggccaggctggtcttaaactcctaacctcaggtgatccgcccacgtcggcctcccaaagtgctgggattacaggcgtgaaccaccgggcccagccaagtgttttaatttttaaaaactatttgaccatatgaaaatatagatgttccattaaatatatatagcctaagaaatataatcagcaatgcagtaaaagattatgtrtacggatgctcctgacagttggatttacaatagggaaaagctggaaacaacctaaatatttgaaaaaagagaatggtaaatacatcaaaaatacaataaatacagtgttaagtgaaaagtttgtgcaattttgacttgagaaatttttaatgtactatgactacttggaagaatatggatgtacctcaaaataagtaatgatctatatgaaagactgtttttgataatttttgttttcttatacataccttccaatattgtccaaattttcaataataagcatgcatagcctaatatatcatgtagatgagtgcaaaatgaacacagagattaagatcatgggcttttcaatgaaggtctgagtttgaatcctgtctctgccatttactagcaatataatttcaggaaataacttaacatctctgctcttcagtttcctcatctgaaatataaggataataatggtatctgtgccttaaggatgaccaaagttatagatatcttaagaatgaattaaatgcgtttctctccatggactattttaacaatgaatgcctgacatagcaattatgttccataatcaccattatttatttataaaattatttagtattatttaatactaacattctggttttataaaaccaaattttaaaaatagataagtaaatgaaaggacaaggaaaacctaatttcactgtttttctagctttttttattgctataacttttatatcataaatccacccatttgaagtgtatagctccattttactatactgttttcatttataaaagccttttataaatttatacatacctttcagtgttgtttgaattttccatagcaagcattcatagcatagtatatcatgtagcagggtttaaaataagcatagaagagggtttcgccaaaagattatttaagaaaatctactaaaagagggttcttctgaaaaataaaatgtatttgcttttatcaaatgagcaaacttcatccacttggagatcacccacatgtgaatttctttctttctttctctctttcccttccttccttccttccttccttccttccttccttccttccttccttccttccttccttccttcttactttctttctctgatggtaagttacattagaggacaggaaggctcagtgatcagttttgatgggatggctgcacagaggcacatggagaagaagcaaggaagccaccttcagcttctgggtctctttgttatacaggaaaggaagtcaactggggtaaacctgtttggaaaggattgagtccttctctcaattttgaagggatgattttttagttcttcagatttatcttctgtaaataaatttcttcagaagcttcctgcaatatgataaacacaaatgattaggaagtgttttgtaaggattggggactaaagaaattattgatgaagccagaatgtgtcaaaaaggtgtcgtaaagcagcaatacttaaacattttggtctcagagtccctttacaatccaggacccaaagaggtttttttgtgtttgttttttgtttttttctaaaatgggttatacctatcatttttttcatattagaaattaaaactgagaaatgtttgaacacaggaatacccaagtacatattccagtgatcagcagagcaatggcatcatcacatcatattgcctccagaaaatcccactgacaatttgttgaagactaaaagggaaaaagccaaacaccttagtatgctgtaaaaayagctttcatctcacagacctcccgaaagggtcttgaagatccatgagcaatccctggaccacactttgagaaccgcttttgtaacgtgtgaccttcccttatcctctgccatgcraaactatctcagaatctaagattgtctacagccacggtacaaccagctctgagactttgaagagaagaaaagatgaacttcatcactaaaaaagccaaagtagttgaaagcaaacactagcygaattttcttcctccaagcctacagaccacctcacgtagtagctgtagtgggagctgctcccaagatttgataagaattagtaaagaggtttataagaccgtgtgtgcagagtctcacagttgctgatacttgttgggcttagctttatctctgtctacagtagcagcccaggacaaaacattcatatgatattctctctttcttctttaaccatagataaatgtcccaagaaaagggaagagaaacagaaaaatcatacatgctaaacaccagtttattaaatatatttgttgctgtttttcttttttacttggttgctcacaatattaatacaccctctttataaaacatgaaagcaatacaaaagtataatgagtaaaatgagaatcctaaaatgttttcttccataatcctctctctaatcgcatttctcagagataactgtgttagcattttggtgtgtttcttatagccctttttgttgtcaaaaataagcaaagataaaggggaaagattttgttctgtttcttttttctatatacacagtatatcttggagatagtttcaagtgccaaatacatgcatttatttttttcacagaatgcaagtcatgtcatagcatggaygaagttgggtttatttaatcattcactagttggcaggtatttaggttgtttacagtttttccattttagaaacagtgttcccatgtaaagaatgtcccttgtgcataaatcgttgtgacatgtgttggaatctcaaaagtggaattgctgagccaggggcatcctcattttaaaatttaatagacatcatcattatcctctagcatgcacatcactttacacaactgatggtaatttatgaggaattctatgtcccctcactccaacactgcatctagtcactctttgaaaattgtccagtctaatgggtgaattatggcatcttgctttgttatgcatttctgtgattaccagtgaacttgaacatctttccatatttttatttatgtttaacatcgaaacacgttacgttttgaatattttcctctactctattactgccttttatccttgattatagtttcttccatcacacagcaggcttgaatttttgtgtacttaaatttgccaatcttttcatttctggttcctgagtttttttgtttaacttaggaaccacctcctcccatactatctccaaggatagaaaaatactgttttctcctagagcttttgtgaactttattttttacaattatatctttagtccattgatggctgtgccttttaaataatgaaaagtccatatttaagttatttttttcccaaatagataaacatttgccttacaggatttagtaagcattttatcctttcttcctacatttgaattgccacctttaacacagggatattaggtaacttaagaggtaaatgtgtgtttcttgaatcccagatctaccacttaaaaattatgtaaggtttgatttactgattcatttttcctgccccaccaacttcatgaccataaaataggggcaggggagaaggaaatgataagacttagcatattataccatatggaaattaartaatacacataaaatacttaaaatagygtcaggcaatttaagagcactcagtaaagttagctcttattaaatttttgcaactccatgtatacctgggatctgtttctggtttgttcatggcagcattgtcaactaaaactttctgtgctattcagtgtgatagttattggacacaatgaccactgaaaacatggctagaatgatgggaaaattaaaattttaattaattttaatttaaagataaacagccacatgtggtcagtargtaccatattggacaggagaatgcccatatagtattttccatgagctttcatgagttatgctttattatataaaccagattttatttaagaactcatatggactagattatgaattttatgagatgattttccttgagtcatcaagaagaacacagtttttttctttaatctgttaaagttgggaagtattaatataaatctagttcctacttgaaatcaacattccagcaataaaccttattggttcttgttattctttgacctcacggttaaatttgatttgctaattttggttagagctcttctatattcatatttgagattattttaaatttgcattgtgcattgactgtgagatgagtattttgttggcttggtaaaatgaattaggagacttcatrttctaaattctgaaatagtttgaatattggagttattatctgttcttgggagatggtttttatcaccagttcccctaaactcctttttaccttgaggtaaagcaaagtctaccttactatttcttgtatggtgattggctattcaggttttctatctattattaagacaattttgaactcactggtgctccaaagaaaatctgaatcattctattacaaagatacaggctcacatatgttcactgcagcactcttcacaatagcaaagacatggaatttacccaaatacccatcattgatagactggataaagaaaatgtggtacatatacaccatggaatactatgcagccataaaaaggaagaagatcatatcctttgcagggacatggatggagctagaagctattatcctcagcaaactaacacaggaacagaaaaccaaacaccacatgttcttacttataaatgggggctgaaaaatgagagcacatggacacaggagggtaacaacacacactggggcctgtcggggagcatgggagggagaacatcagaataaatagctaatgcatgttgggcttaatacataggtgatgggtcgataggtgcagcaaaccaccatggcacatgtttacctatgtgacaaacctgcacatcttgcacatgtatcccggaacttaaaattttaaaaaaatttaaaaaaaaagaaaatctgaacttgggtagcaatatctctacctaatgatactcttgatttttaagtacttaaaatgagtctgaaactgtagaggaagaaaaattcttcctaccaccctcctcctttctctggctggggctttgtaaattggactgacaaagacagcttaacaagagagaagcaggagtttattagtgtgtgcattgggctcacacgtgggagcactcagacgtgagtaactccaagggctggtaagaccttgagctaatatagaatctcagcaaaggaacaataaatttttagagaaatgacaagacaaaggaacgaactttgagtttctagggtggcagactgtgggaaagcaaatatatgggaaacctattgtagataaagattagttagggaagtttatgtggatgcctgtggttccgtctctggactcctaagggtctagagttgtctctgatgattaacttttatccttcctagtagagaggggagggaaaacacctttgcaaatttgtgtcctgcttttaggcaaacaggggcagggcagagagcttttcttatagctgttttctctcaaaattctgtcttcacatcaaaataatcccaatgccaaagtggcgtattttggggtggcatattcggctaccctacaggacctatgcaaagatatatctttatatatatttaaaccatagttttcaacaaagttggaaacaagaataaggattgatttaaaagatattatatagccattgacatcatgctgcataaaacctatttaattctcatctaactggtagattatacaaataataacattgctttcctttggatattagcattggaaagagtgttttttgccagccttgatggtgcacccctgcagtcccagatacttgggaggctgaggtgggaggatcacttgatcccaggggttcgaggctgcagtgagctgtgattgcaccactgcattccatcctgggcaacaaagtgagacactgtcaatcaagaaagagaaaaagaaagagagagagagagagagaattctttttccttttctttcaaggaaaaatcagaaaatgagtggttgatcttagttcaattaaagaaaacaaaacaaacctgctgggtgcctcctctgctctaaatactaagcaagaaataaagtgaataagcccctgccagtcatgtaactaaactctgaatgagggaagtagctaaaatgttacacataaaagaaagctgaatgggaaaaatgcatggaaattatgagtttagggacattttcacttggccaaatgccccattctctttctctacttccaggtcattgtgataggtattttaaatgaacttgaataatcccttaggacagggttgcctgaggaaatgggggacacccagtcaaattggaatttcagataaacaacaaataatttttagcagaattgtgtcctatgcttacttatactaatatatatacatatattttatttgcctgaaattcatatttatctgcactatatctggaaacattaagaataaattgtaacatcttgtatttgtataaggcaacattttaccaatcttttcttcagaatactagttttatgaaactcagcaaaaagggctatgtggtcccaaaagttgagaaggcatttcgtgctatagctcctcttgcttacagctgttaacttggagtgataatcacctgttctgacaaccagcatagactggactccttctagctgttaacacctctgcagcaggactgagaaaggactggagagccacgtgctatggtttacacctctgagcatttgctgtgtgccagccatcacactacatgctttacatacttcatctcactaatcctcacacacttatgaggaaactactgagagtgtatgcatgaggaaatgcctcagagaggttcagcaacttgcccaaggtctcacagttgtaagggacagagtctgaatctattgcctctatacttaatcaataaagattcattatatgcattagctcatcaaaggttctaagatgtctagagtaaggaaaatttttgactttgtttaaataaccatttcctggaagcaccatcgaaaacattggtagttgcagggtrcagtggctcacacctgtaatcccagcaatttgggagaccaaggcaagaggataacttgagcccaggagttcaagccccatctggccaacatggtgaaaacccgtttctactaaaaatacaaaaactagccaggctggtggtgtgtgcctgtagtcccagctacttgggagtttgaggcaggagaattgcttgaacctgggaagcagaggttgcagtgagccgatatcatgccactgcactccagcctgggagacagagcaagactctgtctcaaaaaaaaaagaaaaataaaggkrgggtgttttatatttatatctacataaatctatacattatctagatattatactatattatggaaatgtatatattatattagaattaatatttctaattatcgtatacagttatacattttattgtgttattataacatattatatataatwggttctgtttttctgaagagccataaataatgcattcaatttagaagacaaactcttttagttggaatgagcctaataaaaataattaccatcccaagccaactttaggttattatttgtctctgacagtattaaattatcattatattaaattcctagaagcactatagaaatggcagcagagtatttatattatatataatataggttatattattagatattaatatattacattacaattgtattatcatgatattatatataaattggttctgtttctcttgacaaccttactaatacatccagtttagaacataaattctattagttggaatgagcctataaaaataattaccattccaaaccaactttaggttrtcatttgtctttgatattattaaattattattattttaagttcctaggagcacaatagaaatgctggcagagtgtttatattaaatataatataaattatatttttagatgtaaatatattactttatgatgacattattgtgatatatatataatataatgagttctttttccctggagaaccttaactaatacatctagttcagaacataattctattagttagagccagcctaacaaaaataattaccttcccaaaccaactttagattatcatttgttttcaaggccatggttctcagccttagttgctcattaaaaatattcggggagggcaggcatgatggctcacacctgtaatccctgcactttgggagaccaaggcgggaggatctcttgagatcaggagttcaagaccagcctggccaacatggtgaaaccccgtctctactaaaaatataaaaattagccgggcgtggtggcacatgtctgtaatcccagctattttggaggctgaggcaggagaaccacttgaacctgggaggcagaggttgcagtaagccaagatcgagccactgaaaccccagcctgggtaagagagtgagaccctgtctcaaaaaaaaaaaaaaaaaaaaaaaaaaaaaaatacttggtgcacttatgaaagcctgcagagcccagaaattctgatttaattgatctaagaaaagggagaggtaaaagctcccaggaaagtctagtgcccagccaaaggccatgggagtgatgagtgaccctgcccacacctaacggagcgtcccctgctctgctagtcagtcaacagaacaccagccaatttctctaagccaagagctggttatttccaacctcccctggaagagtttacttaataccataagaagtmattttctcttccatctactgcaagaaaaaactggatattgcaattgccatcctttttgagttaaaatactctacatttttaaacaaataaataaaaaagcttaaccattttgaaattaccagtagggaagaaatcgggtgaaaaaggagaggaaccatgcattactgagaatactcctgtcccaaatctctctccatatccatttcttaaatttattcattcattttaaaaactcaacttacaattcttgaaatctttacctaggatatgtcagccagtattctagacatctggtatacatcatagaacaaaacagtcctgcccccatgaagtttcattctagcttacccctagtatatgccaggctctgaactaagtctaaaacagatgatccctgcccttccagctccctgcaaagccagcattaataataggagggctttttacagaaaatgaaactgtgacttgtttaagttacaacctgtgagtgttgaagtcagagtaccagtctttcctgtataccttaccacctatttgaaaaatgatggatagttatcttaaacggtgaagaattagtgtaagttcttaaacaaaatagtggcgatattaagatcatgcttgagaaacctaattcttgctgtctccttacatattttaagtttggcctaactctgtctctgtgcatagtgagctgtaatgtaactggatgtgtaaayagattgtagcctactcttgtgccaatctccaagttttggccaatcaaaggtggccaaccattcaaaccatgttcaagtaaggcaaacatcaagctgtaaccaacccaactatttttgtaccttgcttccattttccatatgtcacttttctttttctgttcataaattctctcctaccacgtggcatcacgggggtgctctgaacctcttctggttctggggctgatccattcatgactcattctttgctcaattaaagtctgataatttaatttgtctaaagttttccttttaacacgaccaagagtcacagaytgcttagtctggagaagctactcttggctctatgcagtccacaaaaaatgacatttagaaatggttttccttccctggtctccagagaagcagcggctttcatactctgaaatgcagcatcctcatctgtaagatgcaggtgctaaatgatgactgttgttctttcaaatgttaactttctatgagtcacttcttcattgtatgtgtcaagaagcacaacctcgaaagcctgcctttgacaatgcttagaggttagaggatgccaaatgagcctcatcttctttggctactgagttartaaccatccttcatttatctcagggagcaaaggcaggatttccgtgggtgtccaaggtccttactcacagtcaggatgcatggcagtacccttaataactacagattcagaatcacagaagacatttaccgartatgtattttctgccaaaccctgtgccaggtgttattagaacattacttatgaaatatttggtagtgtggatgaagaggcagcttttcctgcttacacaatacagaaatatgatttcaaaaatctattaaaattttattaatctcagaaggcatgatttctaattgtgtttgatcttacacttgttatgatttaggaattcacatctgagttggttgcatgatgctatagttggcaacaygattctgaccgccaccatcacaaatagaggttagaaaatattacttatgtgaaaataaatgccatttctggcacctaaaacagctcttttctcaccttcctatgatgaggttttattgagcttttgcaggaaagaaaagaaagaaatctgcattcaggtttcaggagtaaagaggctgctcattaacaaagccgtttcaaaatctattgaaatgctccaccacgaatacatgccctattactaaaatcactgtcatttctatgcttttcttctcccttcaatcacataccacccagttttcagttcctataattgccaaaagccatttatgaatctgccttattgtatgggttacaaacgtctattttcctgctctgttcatacacatttgggagcaccttaagatgctgaaacactgrcaaatgcttaatatatttcatttgaaagaattatgatctaaatcttaaagaaacagtgagtaaagtgcagtttctgctgcttggttactgtagttcattcggggaatttcatcttggtcgtgttgaatgcagtggttagatcctgtgaagttgtttaattaaaggtgttctagtagtcaaagccatgtctaaaaccccgtttgtttaattctttagtaatgtcaacattcctaaatttcatgtagcctaagagatttttccactggcttcaaatctgagctttgccactttggtgtcctttgctatgaatgttcaatgaggcgttctgagatcaccaagaatagaagagacacacccccggctgtcagaagtttaaccttggagaatgccatgaagggcaattctggaagaaaaaagagaagggaattcctcgtaggtttaagatcagaaagtggggaaggcgggggtgctcttaaatgcatcagccctactgccagcacagtggggactattaacacatcatattttttttttcctgcagttactcaaccttgcagtgggacaagttgctcaatgacttaccaggagacaattgttatttttaaaaatgtctttcttattttaactacaaggacttggcttgcttagaggctcttgctcaggagtctttaaatgcaaatgagggaaaccccaggttataaagcatctgcttctgcaggttttcaatcctgttaccttagcaacatttgcccttgtattccacgcatcaccttgacagcctgcataatataagggacggagcggagcaggggctcggggtgggagcctggaaagaaaactggggctcaaggaggtttaatatcggttagtagcttgggatccttcggataacggctgggcaatgaaaataaaaagccccatttccagaaatcaaagaacttggggagaaataaacacgctggttcaaaggaggggaaaatatatcagaactagtcggacctaagggagcagatattttccaaaaatatccttcccaccagccatgctgcagatgtgtcactgtggctcagaggcaggccatctgctgcagtgtttccctggaaacccccagcaacgcccctcccggagctcctccgcggtctcccccactccatccccgcgcagcggaggagcttgccggtgatgtcactgctgctagctgggagggaatcccaggacctgcgtccctcgggtagagccaatcatggtcggctctggatgctggaaacctggggcttttaaccagaaagaattgcaaaagcaatatgcaattcatcacagtccacaaagcacagttcctaacagattctgaaaacgtgattttaaaaaaaatgagatttatccgtaaacgagggctaggctacagttggtagggcggctgtcaattcttctacggagttttaacctacactcaatggatgcatgaaaaaaagaaatgaaatgatttttttagctactttaaaaaataaaggtaatgaatatttcttatctatatgcatatatatatatatttcattataattgttgcttctgcagaaaattgggatagaaatctcagatgagctgtagttacacggagatctacagcaatgcaatgtttagctagcatgcattttgtcatccaaggctagtaggtgaaatatttcctttacctgtcttgatgcacggtggagaaakgagacccgcttcgttttccctctaatctagagagttaacctcctccaggtagggttgaaaatatgaacagagctgcttttgcaagactgtgttgcctctaaatgtgatttaactcgcatattcagaatcttagcaaaaataaataaataaatagtaagatggggtaaggcaaatacatagatattttggagatcttatcccttattcaaggactgtagattattacagctttgttgtcatattatytctaggcagtaaatcatagtaaagtagtaaattcatagggaatgaattaatctcctttttgttttgttttctctgaaaaagagggtgtgattacagcatatattgattgggtactgattatgggacattttcattgtatttgttgttgttgcagtagactaaatgtcgagcccgtgaatctcttgtgttggcattgtcagaaaaaagttgtattttttttaaactggtctaaaaggaaaaaaattgaacatatatctttatattttttttgctctcttctcaaccatgtttagtgttttgtttatattcaaaggattttattttcacacttacaattctttacttgtctgtcattcaaatctttgttaccaaaacagtttgctctttttcatcattcactaagcattcctttcacagctaagctaaagtgtctatatggaaacatacatayacacacacacacacacacacacacacacatgcacacacactttttccaggccacagacaggaagatatgtgtaaatgtatacatgttttcagtagcatatatacacaagggtctccaataagatttttctagaaacaaaggctgatactacttcatttcatattattgtaaagtgctaattctaagtaaaagtagactaaaaaagagataaaaataaagataaaaatgagtgggctctcacaaccttgtttttttctttttgtttttcacttactctcttggctttttaactccttccttctctgcctcttatgaatgacaccaggaagagttattgtaaacaattggaatttctaaagttctgtgtaactgttagtatattcactatatgcatggtataatttataaaattaatctttgaaactgttaacccctagaaacagaaagaaagaaagaaaaaaagaaagaaacataaagaaatcttgacccactataaatcctgttttctctgccatctcccccagttacacccagggcaagtctatcttcttcaaagacattcagtcagcccacagctttttatcttttcaaacctttaatggcaccattagctacggaaccttgatttccttaatttttcccccactgtcactgcaaccatcacatgtggctctcagagcttctagttccctggaaacaggakttctatctgccatcaccaggtataaggtgccaccacttgaagggatctgccctatcaaaaatgaggaaatatattgatcaaaatggctggagaaagtgaccagccaaaacacagcttcacagtcttgcctgttttaagtagattctatttccattttgccggtgacagcactaagcaaataagcaatgttgccaatccgagaacagcctgcattcaaggtattcaatcaatcaaagagagacaatggcattctctcaaagatcagatgttttgtagtgcaactatgttgttctgtttttctttacttcaattatcagatagacaggaaaaaatacaacaaaatagcatgtagttgatttgccaaaaataaatagcaaagaaaaaacaagaataactagaaaacacgtgacaattttagaaaaaatgtaatcacatttccaattactagacaagatataaataaagagcatttataaaatgtttaaatccattcttttaaaacgataaacaacttctctaactggaaattactgtgcagctgctactttgtattttattggtataaaataactttagagttctatttcattgcattgcaaaggtgtaatactttgccataattaggtttaaatcttgcaaaaatagaaacctgcattttttggttttatattagtttttttaggtgatgctattcaatgggaggatataattgctgtttctatgaccttgggtaagtcatttaacccctctgaaccttggtttccttctttggttgaaaatagagacagtaatacttgacctctctctccagattttgatcaggttaaagaggccaataaaaatgaatgtgattttgtaaatagtgatacacacatctgatgcactgttgtgtatttttgcacctcctcagcagtgctctagctagtctgtccttgtccttgtcaactgtacgtgaacatgatgccctctagtgactgcactttgtagatgctgtaggccccaaggaagccttgagaggaaaaaagagcttaatgaagttagagaagggaagggaggcccgtagcggaaaattatgggttataaaccaataaaagcagcaggaaaaataagcagcagctgactatgagtaagaggacaagatgcacaaagagggagaagagaaaataagcagaatagagagagaggtgagatgtagctgattttggaagagttcactgtggcctggaaggagaggaacaggaatctctgcccagctttgtttataaccggcagtaggtccttccgttcatgtaagctctgccctccacaactcaccctgtgactgcaaaatgagatagttaaaattaaggttcagaattctttgagtcaatgtaagaagatgagcgaaaagtacaatgaaaatgagaactgaaggaggaagagtctgtggaagcaatttccagaatcttgtttactgtgtctaaggtcacctcagtattgcagtaacttaataacaaccaagcggctgaatgaggcaagctcaggtggggtttggtcgatcgcaggatgatcctgtactcttgtagtaacaggagtgttttgcagtacagctccacccttcacaaggatccagcccctgtgagattgcatcctcttagactgaatgcctaggagtctcactgactacctgtctgaagagctccttcttcttttctgaattaatccttctttacttagaactatctgaggatcaagtgatcttccagtgggaggatatttaaacccagcttccccttgcaaattacagatgctataatcctgtctgcattaggcttaggtcatgctttctctaaacgaactgtgtattacaggaaagtaatcaaagtccacaagaactgtgtaattaaaccagtgatggtgcaaataatccagaagtctgtcattgctctctctagacaaaggatcactcaaagatgagaatttgaactaattttactgaaagacaggatgatgcagctgaatggaaagaacactgcataggggtcagaaggtgtggattttcattctgacatggacatttgctatctgcctgatcttctgcaatattctaaacttaacaaagccttatctatacaatgggaattaatccatttattcatatatattaaagattttcaatgtgccaggcactgtgttaaacttccagatggcagtgagaaacaaactctagaatttctgagtcatgataaagatgaaacaggtgttatattttaaaactcgaaatgtcataacagtgtaaggtactatgcattcctaaagcaacataaaacaatagggatttttccaaccttaaagagcagcatttaaaattgagtcttgccttgggagcctgtgacccacgggagcattggaaatgacatcaaccacgaagtcttttttcttccagtgaaatgcaaaacctgctacctccctggagctattagcttggccaaatagtcctctagttagtaagtggacaaagtagttactgcacggctaactgcaactcttcatttaaatatttccctcatgtccagataggatatgtctaatatcatatgcctaatagcttttcagcatctttccacacagaaagaaagggaaataagccttgtcatagccatgaagtgtccccaccaccagagtttcttctctgctacccctatgctgcctaggaatgctaaaactattttatggggccaccaggtggcagttagggcaaatggttttagtttttttctttctacattcttggggaagaccaggggcttaggaatggagaagcaagccttggaaataaaagcattatggagcatttgggggtgccaggccctgtgctatatgtgatatatgcaatacctcacccaatccttatatcaatatctgttaaatatactattgaacaggtgaagatagagtaatatgggaaataaaacatcttccgtaataagcagctagaaagtaccacaatgtaaattcaactgcagaagacatgacaccacagggaaatttcgtttcactgcagcagtgtctaaaaactgaagatggggaaagtgtagagtgtgttattaaaatgattttttcaaaaggttttaagagtctaaataaattgcataattagtcagtttcctwcctcctagtcttcctacctttagtctttatttttagctctcctgagtttgtagttgttctccttccatggtttgattctctccttagctttcagattctatacatttcacttctctttataaataatttttaaaaattcttcatgtgaacctgttcaagaacctgttgcattgaggactgaagatatggctctagattccttactgtttccggtagagaatctgcagagagaatatttcactgaagcaaaattataaatggaacatttgactttatatttccatgtccccaaagatttactaaacattagatctgatttggccaactttttctaccaatatttccggctcttgatatgaaactagttaaagctattttttcccttcaatcagcacattttcaaacttagaacatctattactcaaatttggcataaaattatgcagccagctcattatccactttctgcatattgccaagggctcgctacgtatgtgtgttctggttggcagacattttgggtaactactattctcaatttgtacctactttatttcaatacatgtttcaagatgagtgttaaagggtacattgctttaggaaacttgtctttttctggcatttgaacttgcctaaattagaaaaaaaaattctggttcyagtcctttttttctaaaaaaatattccaaatcattagatgaaactgttaaagataacgtttggaaagtttgtctcctcttyggtgattaaaaagtgctttccatttttggcccatggctcttttcctggggcatagcatttgattataaagcttttctgatgaaagtatcacaggayagcaaacatgagaatgggagaaataattttgcatgcaattttttgtcatctggctgcactgtatgggaaatacattttccctgtcaaaatgtcaagttgttttgacttcacaacaaaagaggaaggaagttcttaaatgtagaacaataactcagctcactgctgatttctatttgttctatccttacatcacagtatagagatagaatgtgtcctacaaatgtccatgcagcaactcatattcacttggcataattttgtttattgtttgagaaagtagtattttgggtaaaaattctgaaacaggcagtgagtatgtctgagtatttctggcaagggctatttcttcctttctccttttactctggagttttcttgaactgagctgtttggacaaatgacacatatttcaagaattccaactgtgggagtgtttcactcacaggattktgctttcttctaagagccaggtctggtgaacactctcaggagctttgtaacatgttccaagctatgcagaagtgcttagttcattcactagtcaaagactaacacatttacagcaataaaatgcattataagcattctttcttcatgaatctattcatcccattaaaaaagcaggaattccaattaagtgaggtaaaatatgctaagtagtacagtataagatttttaaaaattacaccatgtttttcatggattattttaagaaaaaaactattttaagaaaaaactgtcctatttttggaaggtctagtcccaaactgcacaggaaagttagaggtaaactgttaaagtctttgagaactggcatttttcaagccrcagtgaatgaaatcaagcattyctctgtttctcctttcctttcggaatttcttttcctgaggcttgagaaggcaatactggtcttacttttcacatgagtyaagtttatactagctgagcaccctgaatcattaacgtctttctccccaggggagaccaagctcaaatccatcatcagaatacatacttagaccctctcccttctttctggccccctgcttcttaggaatgtgctctaaccaccacagcattcctgatcaccacctccagatgacaaaaagaaaaaatgagtggcagtgaaccagaagagcttaggccatctattttatcctaaaatctgttcagaaatacgaggtttgtatcaattagtaagcacactgggaatacaggtatacaagttgttagcaatatttggttatataatgtctatagatayttattttgctttctctcagatattaagaattatgtctttcctttaacctccatcatttgtttttctactttggtggaagctttttgtttgtwtctttactgcaacagtgaatttatccttggatttctccattatgattggcagtatttatacaataatttcttggtattagttaattgataccttatatttactattttcccccaaagctgagtaaagaatagaatgaaatggcctatacttatcagtgtaaatggatattagaattgctgctcttattccaaaaaatakcactyaaagttcacaaatgaaagttaataactgaattttagtaacaacaacttcaacttaaaaaattccatgtaattaatagctcatgagtcccactgagataggttgaacttcataacttctaaagccttttatgtttctactacttttcagttctaatgttcaatagtagcgtgagtatctggttagtttcagtataaaaaagatgatacccacttgtgatatgattctactttcaatgtcacggtggaatcatttattagttttttaatttaatttttcacatgtgagtgtgatacagaacacctgatttttctacactataggatgtcagttcagtaaatcgattttcctcattagcaactgcttatcaatgactatgctgtatagaaagcaagagtattatactctatttttgatcacagataattgaagtaaatttaattagatccatatgaaagaaataagaactctcacaattgtgacatatatacgtgtctgtgcatatgtcatatcttagtatatgaggtatttgcatgtgcatacttaccaagttaaacgacctcctatcccacaaagttctctttagaaataaacttgagtctcttgtttgtgaaaccaaagagaatttcccgccaaagaaatacctacaaagaagtgtaggtaaagaattcaaatgattgactcaggcttaagatgatttgatagctctttctgcaccaagaaacacagaaaatctcaaagcaggcctgtgccaacttggtataaaaaaagccttcctaaagagtgcattatcttcaatgggaaacgtcgcagtacaccttggcatcaccaggtcaattagtgcaccggaaagatgcatgatatttcctgttggcagccacgaagtgagagaattggacggctactagccctgttgtgtgccaaggcctaaaaatcatgcaaggaggtgaaatgatgcgtgccaagaaaatagcaaccacaggaaacagcaaataatgtaaggttttgtgtctttactctagatgtaaatactcatttaccagggcagctttaaattgacagcttttgggtttgtgaggatattgtgagtcagggttctcctgattgggcaagatgaacgagtgaacaacatcactagggggccggagtagatgagatactcactcattcgtgtgcctgctttagcaccagcagtgtgggaatggggagaaggccaatggtctcaaggcagtttccagctctctggcaaacaagataaggccatggctgtaacagacaccctctgccaggttctaaaatctctctcttatgacctttttaagatctttaaagcaccgtctgcccttggccaacaaaagagaaaaaacagagtcaatgcggaaaacgctgccaagacaacattttcttcttaagatcctaaaagcaccattttccctttgctaacaagacaggagcaataaagagtcaattaggaatatgttgccaagacattggccatataatttctactccagtcggttttgggtttgatgcagtttagaattctctagacacattttttcatttttttttcttactagaacgcagaatgtttttgagagtagaggtggatggcactgctcattagaaatagctgtcctgccccagaacaatcttcaagacaaaggttgcaagactatctttgaccttcctgtccctaaacactccccaaccccaagccaaacacgcgcctaaaagttttcacaccttgccctttactaacagcaatcatatttaggaggaatatattattgttagtcaggaaaytctacctggcttcaggaggtagcttagtgggtatttgctaagtctgatacctttcctttcaacatttagctgagattacctatactaagagcacgaactacaactgtggaaaacagaagaaaggagaatgttctccaaatcaaagtgtgctaaggtcagcttggggcagccaacaattcctggaaggtgacagagataaagttgcagagagggaaatggttgaagacaaatgtctcacgccttaaaatgttgctaaagtaagatggctgtttggatgagtcatcaacaagaacatcacctttgctctcttcctgccacccctgcacttctcaggctactgctcctaaaacctagaactcaggagtgatggaaatagagggcacccatggcaaggaagaaattggagagtaggaaactcagggaagttaatcctgaggaaagtggaaagtgactaaaacattttgagcagagaaaagtcaataaatcaaatatagaaacaagagatgataggaggttctcataacagtccaaatgagaggaccaaaaggcctggagtcacgtcattgcagtaaaatggaagaaaaaacaagagtataaatgaagtgtcaaagatgttaagaaacaggatcttttaaaaaattatttttaattattatgggtacataataagtgtatatatacatggggtacatgtgaaattttgatacatacaatgtataataatcttatcggggcaattggggtgtccatcacctcaggcatttatcatgtcttrtattagaaacagtccaattctcctcttttagctatttgaaaatatacaataaattattgttgagtatcatcactctgttgtgctatcaaatactagatcttattctttctatctaactatgcttttgcacccattaaccatccccaccttctccccatgctggctatccttcctagcctctggaaaccatcattctattatctatctccatgaattcactaggagaaataggatttttgactaatgggtcagaagaagcaaaggaaaggaaaggaaaggaataaagaatgactcaggtttcttgcctaggaaattggttaaaaaaagggtatttttaattaaaaaaggagagttgaataggagactaatttgaaggagaaaatagcctatttttagatgtattaaatttatcaaatttgtgtgctgtatatcagggctcaatcacaattctggcataaatttatatattttatagaacattattaacttgaaagaaatgcatgtattttgttaattgatagaaacaagatcaaagggcatattatattattattccgctttgtaaggaaaaataggttttgcatatttatataaaaagggaaattgaatgtgatatactctggggtattaataataattgtgaattaaattcctttctttagtttatattgctrtctcaaatcttctgatttttctaccttgaatgtaaattttttgtttgtaatatggcactttaaattaaagttgtttttcagctgggcacagtggctcacacctgtaatcctagcactttgggagaccaaggtgggtggattacctgaggtcaggagttcaagaccagcctgaccaatatggtaaactccttctctactaaaaatacaagcaaattagctgagtgtggtggcatgcgcctgcagtctcagcaactcgggaggctgagacagaattgaattcgagaggcggaggctgcagtgagccgagatcataccactgccctccagcctgggcaacagatcaggactccatctcaaaaaaaaaaaaaaattaaattaaagttatttttcttttcttccattacccagactggagtgcagtggcatgatcacagctcactgcagcctcaacctcctgngctcaagtaatcctcccacctcagctttccaagtaactaggactacagatgcacaccaccatgcctggttaatttttgtaatttttgtagagatgaggttttgccatgttgcccaagttggtctcaaactcctgacctcaagtgatcctcccayctcagcctcccaaagtgctgggattacaggtgtgagccactgcactaggccttaaaatttatttttcaaaaacttgatgattcaaatcattgaagatgctcttatgccaaagaaaaggtagttctaggaagttcatggaatcttacaaacacctttacagctcaacagaattgcaaagatgggtagtgttttgttttgttttgtttctctgattgttctacagcttatagatactgaggttacattttatgaaacaaaagtaagaatacatgatttaaaagtaagatcaattcctaaaaattggacctgaaaattttatggatagagtagatagacgtgtagaattcatcccagcatagagttgctgggatattactggtgcttcttcacagggaaagaaacctggctacccagactacaaagggaaagggggaaaatggcctataactcatatcaggtgaattagcaaacattctcatttcagacgatttttgctgtccctggtcatgaaatttccttaactgggttctatcttttactttttatcccaggcttttagcaagggtcataggaaaatggccatttccacatatctggtatatcccatttgaagatattgcctaacaaacattactcaggatcccttrcataaaaacctccatgataaatttcttctgtacttttttccccaaaaagctggattctcctgtaaaactgttatctattctctttatatattataattatggaattcattatcatttctactcttatctacatgactaggtcaccaacagctaattatatagctaattcatggtagttaattttatttacttctcttaagtcatgacttacaaaattgcatttctatgtatgccatcttattacctccatttatttaagttgcatactacttcacatttcctttgaagtgtatattattattagtagtagtagtattttggagacagggtctcactctgttgcccakgctggagtgcagtggtgcaattatggctcactgcagcctcaaccttccaggctcaagctgttcacctacttcagcctccccagtagctgggactacaggtgtgtgccaccatgcttggctaattttttaaaaatttcctatttcttgtagagatagagtcttactatattgcctaggctggtcttgaactcctggacacaagcaatcctcccacctcctcctcccaaaatgttatagacgtgagctaccacacccagccatgagtgtacattataaataaataccaataatgtactttcacatatgaaaaggctataaaagtatgcaaatatattatggcaacatctgttaagggataaagtgacacactgttgctcataactcgaaagaatatatatatatatatatatatatatatttttttttttttttcttttgaaacggtgtctcactctgtcaccaggctggagtgcagtggtgcgatctcagatcactgcaacctccgcctcctgggttcaagtgattctcctgcctcagcctcctgagtagctgggactacaggcatgagccaacatgcccagctaattttcatatttttagtagagatagggtttcaccatgttggccaggttggcctcgatctcttgatctcgtgatccacccccccatcagcctcccaaagtgctgggattacaggtgtgagccattgcatccagcctcaraagaatagtataaaccttatgtgttcatataagcagtagaacctatccctaatagttggattttattgtgtaagtgtttcattaaggaatgtctgaaacatgtccagatttttatttcagtggcttagttttgccacagaacttcagttttataaatgtgtgtactggcttaactgtgaaagtattaaaattattgtattgatttttgcttgcaaatgaaattcataaacagaattatcactgaaatttacatgcaagagaaattgatcaagatgatttgaaaacttatggaaagattgaaggttgccaaaatctttctctttctaacttcctacctttatgtacatttacactctaatcacaggtatttacaggccttaattttaacgaaaatgaagaaaaccaagaaagaaacagctctttagagcaatggaaaatcttctatgatttctcactgacattggctagatactctgcatttatgagcaatcatgcatgtatatcatcagatttaaccttcacaacaattccatatatattatcagatttaatcctcataatagtttgctatcctaggttttagtttagaaaactgagcctcccataagctaagaagttacttgtccaatatcacaactttagataatggtagacttagattaaatccatatttgctcgctctacattccatattcttcccatttaattgaacaagattttggaataaagttgaaatccacaaaaggaataggacagtgacttcacaataaaaatattaaatgtggcagaaagtatggatgtcaatggaatgtaaattctgggcctcctcaaaaacttgatatactcatcctgtgttagttgtgaaataaacaggttggagagtgaggaaatgtggtttttgttcccagagtcattactgaccaactgtgtgctttgatattatatttgctttctgatactaattatattaattctcgctcatagaaatcttccctccttcataccccacctctgtttgattcttaatctcatacataagaggtttttattcaatgtctcatttttctttccaggacaagtatgttgtaagaattaattartagtcttagaaccattcaagcagtaggttctaattgagtatttttctccccggttagcacagcaccctgtcagagccctcaaagtcagacaaagaaggatgaaacatgttttggtccttaataaagaactgctgattgactgtttgaaaaacaaatgccgcacacctgtaatcccagtgctttgggaggccaaggcaggaggattgcttgagcctaggagtttgagaccagcctgggcaatatgatgaaacctaatctctacaaaaaaaaaaaaaaaaaaaaaaaaaaaagagccgggcatgaacctgtagtttcagctacttgggagactgaggtgggaggatcgcttgaaccctagaggcagagttacattgagctgagattatgccattgcactctaccctagggtgcaagattctgtctccaaaaaatgaaaaacagctgtatggtttggagagccagtggctgacaaactgaaggtcatggctaacagagtctccatatcagtgaatctcaaacatctgtttacataaatagcatcttcttataaaaaaatacaaattctgagcccccatcccattatagttggtaagtctaggatgagaccagaaggggtcattttaatgagattttcagatgactttgaatttatatttaatatttattctggtttgcctggggttgaagggttccccagggcatgagactttcagtcttaggcaaactggaatagttggtcactcagatttcggtgcagtggttaaagttaacactttcaaaaatattgtagtgatctagatttggttctaggagtttggctcaattcagggctaacaaaaaaatctgtttagggccacttggggattagtgattctcaaaaggtagtccttgaatcacttactgaatacctatagttgaagaacagataactgcattttaacaagattcaaaggcaaattaatgtttgatgaccgttgacatcaagtctcagaatcagaactgttyaacttccaagcaaatgaaattactaaactcacttctctgagtgaggctgagagcaagaagttaagtataatgttttttgagctaaaatacagagtctactatcagaatcctgtttcccaccataaggattaagatttttttgtttttgtgtgtgtatgtgtgtgtgtgtgtgtgaatgtgtgtgtgtgtgtttgttttttgtttttctgaagtgaatgacatcgttttttggaatgaaaaggtcttgccccaccctgcaagtgtatctctgcctttgagacaatttagccctggaatcaaacctgggggggaaaatcaaattatgatattaaagaaaacgctgacaaatttctaaattcctttcctctactccctgctgcatacaacttccttctttctatctataaatactatatctgctctagaaacgtgaaaaataacataaatattgaacagagtgtgaaggaatttaaactttattgatgagtagtagtattacccttctggactgatgcagatgagagcaccataaagacaaagtgagttcttttggtccttaagccaygaattggagtctggatagtagggatggaaatgggttattagatcatcagttcactttcctctccaagcagcaattaaatttgttttctttgtctcagcttactcgttgctcaaaaaaaagaaacatttcagctcctcttcatggggaataagaccaaacatagaacacttttctcttaacatgtgtggtgcttgagaggagaaagaggcaggaaggaaatgcaggagaaatgtgggaatcacagttaacctgaaggattactttggctgtccccttcagctaatgtgaacattctggcagtcagatgcagccctgtgagaaacatctatcagacatcctaagtagatgctccaactgctgtttttcatgtacagctgactccaagatgagtgtgatgctatcacggtgcaggataacagagatgtaccgcgaacccaacactcaagatgggaatgataaaacttcaataacaaaaacaaaaaaacaaaacaagccacactatcctttcagccttcagggatcgcctccttaaactgttttctaaaatctttctgcactttatatcaggtrcaggagaagtagactacatacattatttgttgtctatctttgaaaggatttcattccctctactgcacttaatcattcccttatctgaatattaactcagtgtaaagcttcccaaattttccaagttcttgaaagagagcaaaacatattgcaaagctctatatgtttcctgctagatatatttcgtgaaagacttcattatgtccactttcttttgagtttttgtgttagccctgcattgctataatttccaacatcccctggaacataatgaaaaccagagaattgctttttttttctgggtccattttattacattcttttacatctcttacttaactacttctaatgcctttgctctgaaactttgtgcatttgagggtttttttttccccgtgatttggtggactgcaagggcacacaaaactagcttatttttcctagtcaggcagttttgaatagaaggtgattgtgttttccagagataagtatgtaagtcttttctgctaccggaggaggattctattttagtagtctattaagtagacaataagcrctgagttatgagttgataagtggatctgcttaccacctagaaacatcaattgaaaccacagcttatggtttcttactgcctctttttggtttctcactgagtctttctggttattgttatcatttcgtttttgacttgggcttggactgttcagcttggctgtgttaatttttcagaatcaatgacttttatagttacttccatgagtttttcctcctgcattttatttaagcaattcactaactatttataagaccatctttgaaagcctgagatacatatctaggcaaatatccatggaaaaaataaacactctgcaaatttgcaaacaaatacagcaattgccaaagtagggttatcttttgcaatcagtactgtggtttcagtttgaaaaaataaagctttcttrtcagttttgctccaagggctatctgattcggtgtgtagtcggtgaggaaataaatacaggtataataatctgtgcttgctcaaaaattaaaaaatcctttaggagggggccaggcgtggtggctcatgcctgtaatcccagcaatttgggaagcagaggcagacagtttacctgaggtcaggagttcttgagaccagcctggccaaaatggtgaaaccctgtctctactaaaaatcttagctgggcttggtgacatgcacctatagtcccagctacttgggaggctggggcaggagaatcgcttgaacatggcggagattgcagtgagccaagattgtccagcctggacaatagagactctttctcaaaaagaaaaaaaaaaaaaaacctttaggaaggataaaactcatttcctctatcagcatagtgtcaccatattacagaagtatcaaggtcaagtattaagactactgaggctcaggtgtccttggctgaagggagagagaggataccattcttgcatagtcttcagggcagcagtaatcagcaaactgataggttgcttctgggtctaaacccactgtaatcatttgcttgtagagatgacaaagttatcagttgtacttacatccactttttttgttgtttcagaagcttaccacacttctcccagtttccttttaattagtttgtaattttaaatcattacattaagataagaggtttttattaaatttggtagaactcatggtaggtcctacagaaatcactgaacttggcagccaaaaacagtgaccaggctgaggatgtgcctgaattgaacagggagatgctatttacttcttaacagagacatacttttcacgcagaaacttggcaactggaggagaaaaacacagaggtgaaggggaaagaagactattctggaaattaacaggtttcaattttggttgttcttcaacttgttagctatgtggccagaaataagcctcttaaactctctattccttggtttcttcacccactactctaaatctgatgaaacagagcagtaagaatttcttaggatatagcttaatttatttttttttaaaaagctcaatctaaaaacaagcttaatttaaaacagagacaaacaaatatgcctaactttgagttttgacaaaaaatgcaaaagtaattcaatggaggaaagatgagctttaaaaaaaaaaaagtgatactggagcaattggatatccaaaggcaaaaaaaaaaagtgcctaaattcatttctcacatcttatacagaaattaactcaaaattgattacagacttaaacataaaatgttaagcaataaaactttaggaaacaaacaggagaaaatgatgaggacctaaagctakgtgaagaacttctagacttgatactaaaagtatgattttcattttaaatgaattttaaaatgaatttcaatgaattttaaaattcattttaatcaactgggacctcatcaaaattaaaacttttgttctgtaagagaccctgtgtaaagaattaaaagaaamactacagagcaggagaaaacatttgccaaccacatattcaagaaagattttgtacctagagagtataaagaactctcaaaactccacagtaaaatccaaacgatccaattaggaaaatgggcaagaaacataaacagaaattttaccaaagatgatatacagatggaaaataagcacatgaaaagatgttcaatatcattagccattaggaatatgcaaattaaamcaatgagatagcactatctacctatcaggatggctaaagtaaaaaagagtaataataccaattgctggagaggatgtggagaaactggatcactcatacattgttgatggaaatgtaaaatggtacactctgtaaacaatttgcttgcttcttataaaactaaacatgtatttaccatatgattcagcagttgtgctcttggacatttatcccagagaagtaaaaacttagactcagtaaaaacctgtacatgaatattaatagctgttttatttgtaaaagccccaaactggaaacaacccaaatatccttagatcagtgactggttaaacaaactgtagcacagctatactatgacatactatgaagcaataaaaaaggaatgagctattgatacagacaaaaccatggatgaatttcaagggaattgtgctaactaaaaataagccaatcacaaaagatttcatgtgatgtgattttatttatataatattcttgaaatgacaaaaatatagaaatggagaacagattagtagtttccaggggtcagagagtagaggagggagggaggtgtgtgtgtccataaaaacgttgcgccagggatcctggtgaggaagctrttctgtatcctcattgctggtgttcacgtgaatctacatatgtgataacatttgatggaaccaaatacacmcacaaacacacacatacacatatgagtgcatataagaccagagaaacttattttggtggattccgtaaatgtcaaatctttggttatgatattgaagtgtagtttggcaagatgttactattggggaaaatagtaacattgtactattgtcctgtgaattattgattcacaggaaattgtaaaaaaaaatgctttgtcctatacatttttttagaatttcctgtcaatccataattatttcaagataaaaaaagttttgtaaaggaagaattttkgagactctttcagattttttattttgagatttaatcwattatatgagaaaaataagctttaactgaccactctttccttcctatccaaagcttagtcaatgagaaaatgttgcaagagaaggagaatggggggtacctgagactccaggagagtacataccctttttaaaaaagcaatacaagccagcagaaaaaggaargatgggactctggagcgattatgtgaatctgtggttctcaaagttcagcatgcatcagattcccagagggcttgtttaaacaaaaatttctgccctgcaaccacagagtttctgattcactaggtctgggggtggtgggtgtggttcaagaatctgcatttctagaaagttcccatgtgatgttgactccagtgctgatgctgctggtcaraccacactctggaaactactgccatagaacatctgagagtcacaatttgaaactgtctcaagaaatttctaagtaaaatgcaatgcaataaattacttaagaattctctatatttacaactctttatttgwatagtttccttccccctcagtatgttggctggtaagaatgttctttttgattattcatctgtgtgggctcaagagtgtgtcactgagttaatttacaaagcctcggattgcatatccatcacatttgtagaaagtattatcccagaaaaatccatcaacacaacacataagctccaaaatgtactgcacaattggcgtgcaatagagtagtcaaagaaccaatgaaatgyaaaaagttatctatatggagatctcaaaatgaattaacaaattaaatcctttgacattgtatgagatcccattagggttcattgttacagttttctttaatgtttctaaaatagaaatgttgtcctgggcagagcagtgtaatgtacttgctttggcatcaaatgccacattttttttttttttgagacggcgtcttgctctgtcacctaggctggagtgagtgtgcagtggtgcaatcgtagctcactgtagcctcgaactcctgggcttaagcaatcctcccacctcagcmtcctgagtagctgggactacaggtcccagstgcccagctatttttaaaattttttgtagagacaagtcttgctatgttgcccwggctgatcttaaactcctagcctcaagaaatccttcagacttgtcctcctagagtgttgggattacaggtgtgagcctccacaccaggcattgtttctattttaactttgctacttacgagaagtcttaatttgaccaacaactaatgtaagctctagtttccccatatgtaaaaagaagataatgcctaaattgcagggtttattgggagaattaataagaacacgcctaggccaggcacaatggctcatgcctgtaatcccagcactttgggaggccaaggcagctggatcatgaggtcaggagttcgagaccaccctgaccaacgtggtgaaaccctgtctctactaaaaatacaaaaattaggggagtgtggtggtgggcgcctataatcccasctactcaggaggcttaggcaggagaatcacttgaacccgggaggcggaggttgcagtgagccgagatcgtgcaattgcactccagacttggcaacagagcaagactccatctcaaaaagaaaaaagaaaaagaaaaataagaacacgtctaaaataattagtgcagtgtctgacacttaagttctcaaatagtggcggtgaagatgtgaaggagggtagagatgactgtgattattaatcatcttatttgttgatcatattaaaatgacaaaaaccacaattattttgcaccaacctaatatttcagcagatgtcctctgaatcagaagtaaatagccatgataatcttaccattagttattttattgagcaattacaagtcccaggctcttacgtttttatattaattttttacaaccagtttatgcgatgcatactgtcctcatttatcatataaggaaactaaaacttaaagagtttaatatattgctcaaggttatccagtgtattggtttgctagggctctgtaacaaagtaccacaaaccaggtggctcaaacaacagaaatgcattgtttcacagttctggcgtcaaaaagtccaaaatcacagtgttggcagctttggttccttctgagggctgcaagggaaagattgttctgggtmcttctccttggcttgtagatgtctgtcttctccctgtgtctctccatgtcattttttcctctatgcatgtctgtctctgtgtccaaatttttccattttaaaaggacattagtcattgctgggcacaatggctcacacctgcaatcccagcactttgggaggctgagagaggcagatcacttgaggccaggagttcgagaygagcctggccaacatggtgaaacgtgtctctgcaaaataatacaaaaattagctaggtatggtggtgcatgcctatagttccagctatttctactcaggaggctgaggcatgagaattgcttgaacccaggaggcagacgttgcagtgagctgagatcatgccactgcactccaacctgggtgacagagtaagactctgtctcaaaagaaaaaaaaaaaaaaagggcattagtcattggattasggcccaccctatggaactcattttaacttgatgagctctgtaaagaccctatctctaaattatatcacattctgaggtgctgggaggtaacactccaacttatctttattgaggggggcagaattcaaatccatagcacatagtagtaagatgtcatgctgaggtatgaaccagacttcatacgcaatgctgtggactaaacttttgtatgcctgtgaaattcatatcttgaaggcctaatctctactgtgacggtgtttgagatggggcgtctgtgaggctttaataggtttagatgaggtcaggagagtgaagtgcttgtgttggaattagcacccttataagaagaaaaaaaggccaaagcctcctctctctctgccacctgaaaatgcaacagggaatggccatccacatgccaagaaatgggcccttatcatacaccaagtcttcctgcacattgatcctcgatttctcaggttttggaactgcaggaaatcgacgttcattgtttaagccacrcagtctatggtattttgttatagctgcctgagctgactaagacaggcaatatatgacatggccgtttgctccaggacttttaggaaatgtggatcccattggtagtgctcagcaatcaaatttatttgatcctcatgttcagcagacatgttgtttttttcttcatgtattgccaactcttttatatgatacataaaacatattgaaaaacgtagacttgctatctttatattccacatgttggcagattctttccaagaaaagtgattttcagatcattccttaggagcgttgaggctgagaagtggtctttgcatatttatatttagaaattatcgagtccaaaatctaaatattgagtcttggtagaagagaaaaccagtcacaatttatgtaaaatagttgttcctaggtaatgaaccaaagcagggactatatttgagaagtagaatggtattgtcaaagtcagtgtacaatcaggaaattaaagagattattttatccaaactattgcagttaatgaggaatgtctcaaaagaaagggaagcagggttttatagatataggggaacaaaaagtttaagggatttcttaaccaccacttttttctagaagcatagggattaggtcacattcaacattttcagtccccacttctacttcagatcaataaacattataggatgctgaacaacatagaggtgatcatcagaaacctgagtaagactgagcagggtctaagaaatagtctctcaagagttcttgttggcattattgtcgtaacatcacctaaaccagctgttgagaagtagtggcaaaggccagttgtttcaaagtcatagagatcaggctccttaaaagagaagtatttaaaatgaaaaacattaatatcaaagattatgttaaagaccagagtttaaccctgagcataccagtccagcaaattccaaaaggtgggtggggaaaatctttcagttacacagtaccrttcgttgagtttcttgaagctaggatgtcaatgttcttgatgatgttcagtctcggttagctttcctctaagagaatgaaggacctgagcttttcaccagaatttgttaggggctcagacagtggtttgtgcagggaaaagtctggcctgcgtgtaatctgctgcagtggtgagttcttcaaagtttgaatcaagtagttggacttcagctggcagaatttcttcaactcctggagaaaagagctagctgctagacaacctagagttccaacaggaatctgggcaatcagatgttatttttcagtgacatcaagttagggaaagagagaaaaattggaaacattaatttgtagggttgtagccagatattgaagcaaactggaaggcttcacagtttggtacaaattaacaatttgggcaagataacaggatccagttcaatttttaggaaggtgtccaaactgctttttccacaraggaggggaagtcatttaaatcattccagacaagtcagaatttgcatatgtatcagttacctgcaatttatgaaactgtataatatggctaagagataattatgtctacaatctgataaacaggaaggagctgcttgctatagttttccactgaaacaaaacatttctctctatagtcacccctcttttgatcaaaaataatctcaaagaaagattattcttgatcacaaaataaagctagtaccatcagatttggcctgattatttacatkgttgtcttaaagatgataattcactacatagggtttcttatatttgctttgctgaaagttttcataaggaatctcaaattgaatttttaaaaaccacttgaggctaggaagctatatcaagaactcaccaacagatttacctacagtatctataaatttcrgtaaatgcctctcttttagaggtcccaaaaatatctcaagttttctgagcctgcgaggaagtatcctttacctgtaaatttgggcacctcattagccagraatcaggctgrttttcccaagagggctttaaatgagcatacctaatgtttccaatatttcatgcaaacaaggaagagttttattgaacctatgcaaataactataattttgaaatataatgagaatactcagtaagaatttctgatttctctaacagtcaggcaggaagaaaaagataccaatgacaaatgtttcatttatatttgcaaagcatagacttctgaattrttatgagtttcagttagtttaagagaaaatagaaakaagtttcctatgtccaaaaaatcaaccattaaaatatcagcaatattccaaacaaaagctacagtcattcctcatcagttccttcagtcctgtgtaattcttgctctgcttcctcttggcttaacagtttcatgcatacatctgcctctccaaacagggctctggaaatcctgactcagtctgctggtatggtctcaaggttgtgtaagtgacggcatcagaagcttctgccccaaatgaaaagtacctggcatagagctttgccatggggctctgagataatcctttgttragacaaagcactacagctagatttgtaagagctttcagggaagcaccacaaagcaaaattctatttgtaaatgacaaaagccttaaaaattactttgaaaaatcattttcaaacgtgaaagatgtaaggagtgtttatcacaagaatctccatttgaaaaatactggcttataggcacagaaaaacaaagatagtatgttctcacttacatgaggaatcttaaaataatcacactcgaagcagatagaatggcggttacaggggatgggggtggagggaatggggaggtgatggtcaaaggctataaaatctttattaggaggaatctgtttttgttttttgagttctagtgtacagtgtggtaagtgtagttaataataaagtgttgtacatttcaaaattgggaagagtaaatttcaaatgttctcacacaacaaaatgactagtatttgaagtgatgtcgttaactggctcaatttaattattccacatggtaggcataaatcatattatcactttgtaccccatatacttacaatatcataaattgtcaatttacagtttttttttaaaaaaaaggaaagcactggcttagaakaagctaatttgaaattaacgaataaaagttgttaccaagttaacattttaaaaataactgaaacttatgactcatgtggtgctctctaataacagggcaaagtgacatcgggactcaaagaaaaacacgttatggacataaaagcctttgatgactctctaggaattttccatacagcatacaatttctgaaatatttatactgataacattctgcccatacagatttgtcctagggaaggttaagcatctcttctgagtwggcaatgactcccgtgcaatttgtaaatagtaacatatcaaataaacctaattcttttcagcaactttcttttcataaggtgaaataacaaatcctttgtgattttcaaaggccctctgggagatatcaaagacagtttcagatgcaatagatatcacttaggaatcagttttgggagggaaaatatcaaaagttgtcaggagattgggacactttactaggatacggtcgtgagttactgataaacaatactttgctaccttaactaaggtgacagcaaaaagagtgaaaaagtaagcacaggcagtaacatgattgtaaagaatcttagctttttcaaaagggagaagactttattaaataagcaaggacgtgataaactcaatacacaatataggaagttattttaagacatgkaatctttgccttctaggcagattactcagaaggtaaagaaaaaatattattaagagtagactaagaagtyaagaaaatgttatgtttttaaacagaggcaaaattaaattctactttgcatcattatggcatttgatattaaagatctttttgaaatcttataaatgaattcatcaagccttagctagcactgaccacagcaaagtttgtttcccacaagcgttttacaactttctacgtctattcagcttttgtcctacacattaacaactagctatatgacttcagaataaaatgactctatttttttcttaacaaaaacatgttctgcaaaccttgcatacaaaattgtatctctctgctattattatgccttgtagaatctcattcatgtatattgattataatttttaaatagaaatagtaacatctgttgcacaaagaaaaaagggaaatggataattgtgatctttctgtcatacataagctttttgtaacacactagtggaactcatgaatacacatctcacaacttttaatagccatgcatattatttacagcacgacttatgcaaagtggcaaaaatgaacacatttattaacaaaactgaatgtacatgcttctctatagcatatagaaacaaaaggcaaaaaagtatataaacttaaaattatgcttggttaccaatatttcacttttctctcttgcatagaaattacataaatatccaattaatattcattaattaattcaatttagcttcaatccaaggttttaaattaccaaatatcttggaatttgtcttcaggctgacatgctccaaaatattagtaccattgaaagtttgttagaataatgactcaatttgcttaaacacaaatttttattttctattgtattaaacattaagtagaagtaatgctaggttatttggttggtaaatctaagtttaggaagaacattcacaagtagaatagaagcatacttgtgttatatttaacactaaaaactcagagaaaacagctatttttactaaatcaacctcattaattgattatcaaaataataattattgttaaatattgtttgccaaacatttacctagattttgtgaacttgaattattgtctctgagttatgttcctacaagakacagctttttcccctacagtaaaagtgtttaaggctcaatttcctcaacttctgggaatttgggaaatatttggtttatataaatggttatttatttctaagccaattagaatagagctcctttaagagattctataacctaatttagcgacaccatcctgaggtagggaaatattttatttttatttttttcagagatgggctagattagaactcctgccttcagcctcctgagtagctaaggttgcaacttccatagtagctgaaattgtrggtgcatgccaccrtatctggccaacagggaaatattacatactctaacaatgagtggtgacwtcctttctgaattacagacatgtagacattaaagcagagatagcaagaatttagtttccattctaacatttaagccatgggtcaagagtggacacagaatcacaaaacttactgtttcatatcaaagagctgttctgttctcatgattcttaagtgatttgagctcaaaacagacaaacagaaaagcgtagcaaaccaaattctctgttgtctttcacccataagatacaagatctctaaaagtcattaatcccctctcagagatcaccaagtggtcagaccacaaaaccaaagccagtgccagaaatcaagtgagtactaaaaccttgccttgctaccaatagacaagggtccatatcacaggaccaggagttagacttattcatagttccttggaccaggaatggagcacaaagggcccaaataagccttattacctgtgttgagtaaacaaagatcccagtgcaggagatccatatcatggcaccaaactatcaaatacaggatgcactaggtcattaaagagaagattttattcaaagcattgcaaaatggagaacattgatttatggtgaatatcttgaagaaaaggaagggggtctggggttctatagrggcaagaaaaaacgggagtcatccagaagtcttataaaagtcatgaagaagggtggagatgggtcttatctcagaatatgggaaggcagtttgggcctttgcattagttgtttgccagacactaaagggtagagaggtttcttaatcattactcttttccrgaagcacagggctcaggtaagattgaatatttttcatgcctttcatcctctctgtctgatctctttcaaacygtcttttttgttgaggctatatgaaatgtttactgttttaccttccaatcaactccataaaaacggttgatataaagcatctagccaagttccactacattttagtcattcattatggaacatcatcccaaggaaggctttattctctctgtctaagcaagcaatgaagggagatcttttggaaatggcctagtatttgatgagaagcaagaacaaggtctacattagtggatcacagactttttgccactgagatccaccatcgaaaatgcattcattattacctctgcatgtgtttatttaactgcaacaatagtttaatgattttcataacacaaaacttcacagtgtatgatgacactgataccttctagtctattcccagctgttctatttcatttttttatagcttatagtgactcattaaaatggatttccacgaatgcaatgcaacacacagtttgaagtccactggaaaatcttttaaaactgttattataaaatgaatttagtaaccttttcaaaattttactagtrtagtttctgtggtttttaagaatacaaatattttgccttctggtcttttttttcacacaagtatatggcagattcctataaatattttaatagatcagcagtttccaatgccatgtttcggtgatgatattttaccagagatagtctgtaatgaaaaattgagacaaatgatgacaatgtaatttgcagacatgtatacttatttataataaatttgtagacatgtatatttagttagttattcaacaaatattcagtgccttttatatcttaagaatggttcatgwtaattggaggcaaacaagaaaggcaaagttactgcttagttgaaatttacattctagtataaaaattgccatatttattattattattattattatacttaaagttctgggatacatgtgcagaatgtgcaggtttgttacataggcatacgcttgccatggtggtttgttgcacccatcaacccatcatctacattaggtatttctcctaatgctatccctccccgctccccccaccccacaacaggccctggtgtgtgatgttcccctccctgtgtccatgtgttctcactgttcaactcccactwatgagtaagaatatgcagtgtttgtttttctgttcctgtgttagtttgctgagaataatagctttcagcttcatccatgtccctgcaaaggacacaaactcaaccttttttatggttgcrtagtattttgtggtgtatatgtggcacattttctttatccattctatcattgatgggcatttgggttggatccaagtctttgctattgtgaatagtgctacaataaacatatgtgtgcatgtgtctttataatagagtgacttataatcctttgggtgtatacccagtaatgggattgctgggtcaaatggtatttctggttctagattcttgaggaatcgccgcactgtcttccacaatggttgaactaatttacactcccaacagtgtaaaagtgttcctatttctccacatcttctctagcatcttgtttcctgatgttttaatgatcgccattcaaaccggcgtgagatggtatctcattgtggttttgagttgcatttctctaatgaccagtgatgatgagttgcgtttctctaatgaccagtgatgatgattttctcatatgtttgttagccgcataatggtcatttctctaatgttagctgcataatgtcatttctctaatgaccagtgatgatgagttgcatttctctaatgaccagtgatgacgattttttcatatgtttgttagccacataaatgtcttcttttgtgaagtatctgctcatgtcctttgcccattttttgatgggattgtttttttcttgtaaatttgtttaggttccttgtagatcctggatattagccctttgtcagatggatagattgcaaaatttttctctcattctgtaggttgcctgttcactctgataatagtttcttttgctgtgcaaaagctctttagtttaattagatcctgttcatcaattttggattttgttgccattgcttttggtgttttaatcatgaagtttttgcccatgcctatgtcctgaatgatactgcgtcagttttcttccagagttttatggttttaggtcttatgtgtaagtctttaatccatcttgagttaatttttgtataaggtgtaaggaagaggtccagtttcagttttttgcatatggctagccagttttcccaacaccatttattaaatagggaatcttttccccattgyttgtttttgtcaggtttgtaaaaaatcagatagttgtagatgtgtggcattatttctgaggcctctgttctgttccattggtctatatatctgttttggtaccagtaccatgctgtttgggttactgtagccttgtagtatagtttgaagtcaggtagcttgttgcctccagctttgttctttttgcctaggattgtcttggctatacaggctctcttttggttccatatgaamtttaaagtagttttatctaattctgtgaagaaagtcaatrgtagcttgatggggatagcattgaatctataaattactttgggcagtatggccattttcatgatattgattcttcctatccatgagcatggaatgtttttccatttgtttgtatcctctcttatttccttgagcagtggtttgtagttctccttgaagacgtccttcacatcccttgtaagttgtattcctagggattttattctctttgtagccattgtgaatgggagttcactcatgatttggctctctgtttttctattattgatgtataggaatgcttgtggtttttaaacattgwttttgtattctgaaactttgctgaaattgcttatcaktttaaggagattttgggctgagaagatggggttttctaaatgtacaatcatgtcatctacaaacagagacaatttgacttcctcttttccaatttgaatatactttatttctttctcttgcctgattgccctggccagaacttccaatacaatgttgaataggagtggtgacagagggcatccttgtcttgtgccagttttcaaatgcttcctgtttttgcctattcagtatgatattgcctggggggttgccataaatgactcttattatttttggatacattccatcaataggtagtttattgagagcttttagcatgaartagcattgaattttatggaaggccttttctgcatctattgagacaatcatgttgtttttgtcattggttctgcttatgtgatggattacgtttattggtttgtgtatgttgaaccagccttgcatcccagggatgaggctgacttgatcgtggtggataagctttttgatgtgctgctggattcagtttgccagtattttattcaggatttttgcatcaatgttcatcagggttattagcctggcattttctttttttgttttgcctctgccaggttttgctatcaggatgatgctggcatcataaaatgagttagggagaagtacctctttttctgtcatttggaatggtttcagaaggaatggtaccagctcctctttgtacctctggtagaaatcggctgtgaatctgtctggtcttgggcttttcgattggtaggctattaattactgcctcartttcagaacttgttattggtctattcagggatttsacttcttcctggtttagtcttgggagggtgtatgtgtctaggagtttatcaatttcttctagattttctagtttatttgcgtagaggtgtttatagtattctctgatggtagtttgtatttctgtgggatcagtggtgatatccccttcatcatttttttattgtgtctatttgattcttctctcttttcttctttattagtctggctagtggtctatctattttttaatcttttcaaaaaaccagctcttggattcattgattttttaaagggtttttcatgtctctatctccttccgttctgctctgttcttagttatttcttgccttctgctagcttttgaatttgtttgctcttgcttctctagttcttttaactgtgatgttagggtgtctttcccactttctcctgtgggcatttagtgctataaatttccgtctacacactgctttagctgtgtcccagatattctggtacgctgtgtctttgttctcattggtttcaaagaacttatttatttctgccttcatttcattatttacccagtagtcattcaggagcaggttgttcaggttccatgtagttgtgtggctttgagtgagtttcttcatcctgagttctaatttgattgcactgtggtcaaagagactgttatgatttccattcctttgtgtttgctgaggagtgyttcacttccaattatgtggtcagttttagaataagtgagatgtggtgctgagaagaatgtawattctgttgatttggggtgtagagttctgtagatgtccattaagtctgcttagtccagagctgagttcaatggaatatccttgttaattttctgtcttgttgatctgyctaatgttgacagtcaggtattaaagtccccactattattgtgtgggagtctaagtctctttgtaggtctctaagaacttgctttatgaatctgggtgctcctcatattgggaatctggttgctccttgtatttggatgygtatatatttaggatagttaactcttcttgttgcattgatctctttaccattacataatgcccttctttgtctttatctttattgatttgaagtctgttttatcagagactaggattgcaacctctgctttttcttgctttccatatcttggtaaatattcctccatccctttattttgagcctgtgtgtgtctttgcacgtgagacgtgtctcctgaatacagcacaccaatgggtcttgactctttctccaatctgccagtctgtgtctttaattggggcatttagcccatttacatttaaggttaatattgttatatgtgaatttgatcctgtcattatgatgctagctggttattttgcctgttagttgatgcagtttcttcatagtgtcaatggtccttacaawttggtatgtttttgtggtggctgttaccaktttttcctttccatatttagtgcttccttcaggagctcttgtaaggcagacctggtggtggcaaaacctctcagcatttgtttgtctgtaaaggattctatttctccttcacttatgaagcttagtttggctggatatgtaattctgggttgaaaattcttttctttaagagtgttgaatattggcccccaatctcttctggcttgtagggtttctgcagagaattcctctgttagtcttggactttcttgaagaaatgggcttctctttgtgggcaacttgacctttctctctggctgcccttaacattttttcctttatttcaaccttggtgaatctgacgattgtgtgtcttggggttgctcttcttgaggattatctttatggtgttctctgtatttcctgaatttgaatgttggcctctcttgccaggttggggaagttctcctggataatatcctgaagagtgttttccaacttggttccattctccccgtgactttcaggtacactaatcaaatgtaagtttggtcttttcacgtagtcccatatttcttaggggctttgtttgttccttttcattcttttttctctaatctcgtcttcatgctttatttcattaagttgatcttcagtctctgatagtctttcttctgcctgatctattcagctgtcgatacttgtgtatgcttcgcaaagttctcatgcagtgtttttcagctccatcaggtctttatgttcttctgtaaagtggttattctagtaagcaattcctctaaccttttttcaagtttcttaccttccttgcattgggaggagcttgttattacccaccttctgaagcctaattctgtcaattcatcaaactcattmtccatccagttttgttcccttgctggtgaggagtttgtgatcctttggagragaagaggtgttctggtttttggaattttcaggctttttgcactgatttatcctcatctgtgtggatttatctacctttggtctttgatactggtgacctttggatggggtttttgtgtggatgtcctttttgttgatattgatgctattcctttctgtttgttagttttccttctaacaggcctctctactgcaggtctgcaggagtttgctggaggtccactcgagaccctgtttgtgtctacggccataccaccctgaatgcgcccgatctcgtctgatctcagaagctaagcagggtcgggcctggttatacttggatgggagaccctgtttgcctgggtatcaccagcagaggctgcagaacagcaaagattgttgcctgttccttcctctgaaaactttgtcccagagggacacctgccagatgccagctggagctctcttgtgtgaggtgtctgtcaacccctgctgggaggtttctcccagtcgagagggatggggatcagggagccacttgaggaggcagtctgtcccttagcagaacttgagcactgtgctaggagttctgctgctctcttcagagccggcaggaaggaatgtttaagtctgctgaagctgcacccccagctgccccttcccccgggtgctctgttccagggagatgggagttttatctataaacccctgcctggagctgctgcctttctttcagagatgccctgcccagagaggaggaatctagagaggcaatctgactacagcatctttgctgagctgtggtaggctctgccaagtacgaacttcttggtgctttatttacactgtgaggggaaaactgcctactgaagcctcagtaatggtggacacccctcccctaaccaagctagagtgtcccaggtggacttcagactgctatgctggcagcgagaatttcaagccagtggatcttagcytgctgggctccatgtgggtgggatccgctgagctagatcacttggctccctgactccagccccctttccaggggagtgaacagttctgtctcactggcattccaggtgccactggtatgaaaaaaaactcctgcagctagcttggtgtctgcccatatggtaaccagttttgtgcttcaagccatatttcttttattggaaaatatagaacttttccttctcacattcaacttcttgagaggatctctttgataatgtgttcatgtacacagttcacatcaaatatatataacatgtggatcaaagtgttaagatattcttctttacatatagtgttagtagctgacgatttttttttcttcaaaaataaatttggaaacttgtcagtccataatttttttaagtattattttactatctcatgaaatctgaaaggctagaatacactagataactcttgatttccactcctaccctgccatgaagtgataattcacatctggctataacttcataaaaggggcaggrcgacccacttcctaaaagaccactattgacttgaagacctgtgtctcttgtctcacttctaaaagtgatttaaaactcaataactcactctgaaatccactgtataagaaatagtaatgtttagggtcatttaaaagaaagattagtttaataaattttggcaccctgtttaacatataaaaccatgaccatgtgttaagtataaccatattttgtgcagaatgtgattcaaaagactgatttaatagctatagtccaagaagtgttgaaaactcttgcccagtttatggtttccaatataggacacatatcaacagaataagaaactcaagaattaaactgatgactgtgtcgacctctggaggaactcttttttaagacacaaagccaaattttcaccttcatttatgcacactcatctyctgaaggcttmcttatgcatttacgtgtgaaggaaggagaggatttgactcagtctctttgtctgtcatctttcttcctctctcattctgaaatagcttttcacagttgaggaaaaaataaagatttgaccttcccacagtgaatgataacaatgataacagctgatctttatatagtgtttattatatgacagagatcatttcatgcactttgcttctaagaactcatttattccttacaacactgtaagtactgttatccccattgcacagacaagaaaaatgagcttctgtattagtccattttcacactgctataaagaacttcctaagactgggtaatgtatagaggaaagaggtttaattgactcacagttctgcatggctagggaggcctcaggaaacgtacagttatgtggaagaggaagcaggcatatcttacatggtggcaggtgagagagagagagagtgtgtgaaggaggaactgtcaaacacttataaaaccatcagatctcgtgagaactcactcactatcacaaggttttttgcacagacaaaaccacccccatgatccaatcacctcccactaggtccctctctccacacatggggattatggggattacaattcgagatgagatttggatgtgggcacagccaaaacatatcaggtacaaacaaatagtggagttaaaaatcaaacatggaccatctgcctctgtagtccaggcccttaaccactacattatataacctcttgagagaggaaaacttagattgggcaatattagcatccaattgccagtgcaaaaggaaatggaagtcagcacaccagcttattacttacccgagatcaataagagacctgcaaatacttgactccgggttatagacttggtaaatccaaatgatttctctcatgaatccgaatccctgccagtaatgcagatattctaacttgagacttaccttccagactgaaaatgccaaatgagaaaaaccaagtaagtttgagtttctgcagttacaaagtgctatggtttgaatgtccctatcaaaactcaggttgaaataaaattgccattgtaatggtattaggagatggggcctttaacaggcgattaggccatgagggctctgccttcataaatacattaatgtcattattgcaggagtgggttagttatcacaggagtgggttagttattgtgggagagggttcctgataaaagcataaatttcacccccgtccactccatcttcagtgctcacttcatccttccaccttctgccatgggatcaccatccccagatgccagcatgatgttcttggacttcccagccccagaaccatgagccaaataacttctcttctttataaattgcccagttgatggtattctgttatagcagcagaaaacagacaagacataaaggaagacacataattaccctcccccaacagttcatgttacccctcaacattgttttagtcagtgcaagactaccaaagtataggtgtctgaacatcagggaaatgtaaatagagaaggtaaatgaattcaaccttccttttccctatactctcatttctgtcaaatataaaaacctgtgggttttacccttgttccagtttacataatcacattccaaattacttatgtggacttttatgagggctttttttctttacacctctctccttttctcatcagcctctgcaatcagctttatacaagagttatatttcattcatttcattttcttttctttctatttcacaagttctgggacttggctgtcaaccgaatcttgaacttggtaattaaattgttcataagctccaaacatgttgtaactcatgtcatattcatgtacacttctctgccccaacttgataaaatgagtgatactgggacaccattgtcatacacacctccaaacctgggtgtgtccacttcaaatgcctgaacttgctcaaatagaaatgggattactaaaacaactatatatcctcaccatgctggttttagtaggaaagatgcatcaaggataaagctctccagtgaaaagcatggggctgaaagaaggaagtctctctgaggcagaagtcctttggaaaaactgaagatgacgtcctagataattttgaagtcttatgtagcaacagaagtttatgtcattaatttagcaaatagtcatagacaaaacatgcaactttagagcaagtgccaggctgtgccaataattccacccttcacctccacatggggtcagtccatagaacaaaataccaaaggccttagtgctcaggtcttttgctcctgacattctcccttcatcctttccctatccccacttatccttttttaatgcactatagatgagtatgtcttaatttcttaagttaatttgcattggcattaagcacctactttatttatttcctttctcaacaactctcagactttgattcttcatgtccttccagggccctgccccatgccttctgctaaatgctaaagtcatgcaacagtttagtactgcgtagagtaggatggctagcaaaaggaaatctctcaaaggagcttcatgctctctgtgactcagggtagcagtatatggccttcggcacccactgtgggctgggctatggcagactttgcttgccctcattgctctctttgctttccttgatcttgcccctgtctgtcttcattttctcccttctcacttttttccctattgttacttacagtttaagttatggaagaaaaacacttaatgcttattggccactggaggatacacctcataacttggaaaatgaaaataaacactttaatagttttgtacttgatatgatgactcttttaaacaaaacactttttatctaggcatgaccttagatttatgggaaaagaaagttgcaaagatagtacagagagttcctgtatacctgtcttctagcttatgctaatgtggaaaacttacataagtgtggcacagttgtccaaaaaataaattcacattggtataattctattcactcaaattcagactttactcatatttcatcagttttttcattattatcctttttcttttcccagatctaattcagaataacacgtgtgttactacatgatgatttaaaatgtttacaaaaacaagacctctacctatgctcctattagtgtgtgtgtgtgtgtgtgtgtgtgtgtgtgctggtgtgtgtatatctttatttaataataaaactagaagggcaatgaattcgaaacggaggcttttcttactagcctttttaagatagacattgctgacacatggacagggattgaattagtacaaatattaaatatcattaagccttcttttttgagttctgtctgcacatcaacttcacctgaagaatgtttgtaaaatacacatgcttgttccccacccaaaatctattgaatcagaatctctagggagtgaggaccaacagttgygcttttaacacctccactccccccttgtattggacggtaaaggccagaaaagattaccttaggcattctcatttcagaagctaaaacagacattcaattttctataccctaatttgggacttatatctgagtgttaatatatgcatgtaatactttgtgatgaatgttaaatgtgttttaatagtgttcccttgcagaatattctttcctttgccggtattattaagactatcttgcattgggattcatgcccccaggcttacagttctctgagctatacttgcatacactgtcctcagtgaacctgggctttggatccagatcgccttgaattcaaaccctagatctgccacttaaagactcaagaaacttacataacctttttgtaattgttctctatctataataaatgaaaagtattactaattattacttacatgcaagattgttgtgagcgtaaaccacatgatgtgtggaaggtttggggcacagcattctttaccaattcagggtaaccctgaaaacttaggaaaaagagaggattcatataaatcacaaattttgcaaatgcattttaaatcctctctttgttccagctccttgtacagacaggactgcttgctactaagaatttccaacacaacctccaattaaatagttctttgatgtatagtgggtacagaagaagtccaacttatttgcatttgcagaatcaggagacccccccaaaaaatgctggaggtgtgaaagcaagaatcagaatttgtcaggattctccgtaaagtactagcggttttgtagatgctttgcagctgtggaactataaacactcaaccgcagacacctcattttatatctcttctatgtggtatatttcccttgtgaaaatgtgtatttttaaaattcactctgcaaaatgacagtcaatgttatcaaatatacatttatatgcccttgattgtaaaacccactacaaagtttattaccttaagtttaatagaaaacaattttgaaaaatgggaaaaaaatatatctgtcacagggaagtggttagaggttctaacagaggagatttcttgttagaataatttgttgtattttggttatacattttttgtttttctttcgaatgttgaaaaagttaagaatatattaatacatggacaggttagaaaatatgtaaataataggttggtcaaatcctgcagatgacaaatcatgagagtttgccaagctaaggggccctggccactcataccatccctttatctaactcttcctcctcatccagtcccataataaaaaatattaagcttgcacgtggtaccttctcttctaggctacttgttaatgggtcctcttaattggctatgtataaaataagattcccatgggcagaaatctttatctgatctgttcatggacatatccaagtgtcaactagattttggcacacagtagatgtttggtaaatatgtattgaatgaatgacagacactgtgctccacattgtaaacacatcatatcatttaatcattataacatccctatgctatcccctatgtgctattattagctccatggtacagacaataatcaggatagatcaggaaactaaccaaggttacacggacagtacctagatggcaggaggccccaaagcatgtgtactaagcattatggcacactgccttcctgtctggcattcttgggacatgcatgtgtgagcgataaggtaagtccaggaaagcgtggggcactgggagaatgtagaagtagggatgatggaatttcatttccacagtgagagccccccatcctgctcccattgtcagacccgcactttttgttatctcttttccttctgtcttgctacgtttgctttgtcttcttcctcgatagtttcccaaagactttaaacgactaactatcaaagaagagaatatatgtgaagtcactagttacttttctgctcaattagctatatatagattaactttttaaaaaaatattttccccatacacccactcacataactgtgaagcttaggaaaaatttcaagattatcgtgggtgggccccatataaatccccacactgtcaattctcccagcagctgtttcttaattcgtcatcagtgtagaaatctaaatcagcactcagtgaaatctaaaagtccaaaagatttatttcaaatttcaaacctcctccctaatgttctgaggctgtgtcaacacaggtagagagacggggagagctgagggtatttaagaatcacataatgtgagaaactgaggagaccctagggatcttttagccctaccccctcatttacacataaggaaatgggatctgaggccaacagcaaacttgcctgcctgctatctgggaagttctattaataacacactgtcatgggggaaaaaattcatacaggtaataaaggtttgttattttcaaagattaacattctttattaattaccacttttttgaaactgacacagccacaaaaaactcctgtataagaagaatttgtctaataaattgtatgattgtttattgggtatctgtttattttcttaatttttaattgtctgtcaatccttcttgatttaaagtagtcacataaatatataaatgtaaagagttaatataactaattgaattcatttgagggaaaaaaattaaattttctttttaaaaaaagaaagaaaacattaaagacagaggtaacattagcacaaaaaaatgtgtataatcaaagtctagagggaggcctaaatgtaaatcaagctttctagtaagcaaaaacaaaagagaaaacctggttaactccaaggttcagaattgctgtgatatgcagacaaaccagctgtgaagacactgcacaacagtctatgataaaaagacgggagggacatttcttgtttgtatagcaaaggtctacaatttgcaatgcactgtggtaaaacagaaaccataagctgaatgcttttgtcactgaacttatattttagttagaaaagacataagaaactaattgtggcatttaacttataatttagttagaaaagactaaaaaagctaactgtggcatgaatgagaaagaaattactgctctattagtggttccaatactgtgaggccacaggaaaaaaaaaaaggattctgaaagatacggtttggaaagacttcgtggaggaagtggcatatcaacagggacttgaaggctgcctagatatgcaaagaaaaagttcaacggaaatacaggatgaaagaattgggtggtcaaaggaacaaacccacttgctgatagattgtcaaaaagtatagtgtctgcactactatgtgacgatgacattttttttccctttgtcatctaaaattgctatcaggccgggtgcagtgactcacgcctgtaatccaagcactgtgggaggccaaggcaggaggattgcttgtgtccaggagtttaagacaacctggcaaatatggtgagacctctctacagaaaaaattttaaattatctaagcatagtggtgtacacctatagtcccagctactcaggaggctcagataggaagatctcttgatcccaggaggtggtggctgcagtgagccaagattgtaccactgcactccagcctgggcaacagagagagaccctatctaaaaaagaattaattaattaaaaaaataatattgctgtcagtaaagactgactagtctgtgtgatatttatcatagctatatttcataactccagtgacctttttaaataaaaagtaaggtccagttgaccctccctgtctgtaggttctgcatacattcaaccaaccatgggtcaaaaatattcagaaaaaaaaatttaaaaatacaataaaaactaatgtaggctgggtgggtgcaatagctcacacctataatccttgcaatttgggaggctgtggctagaggatcacttgagctcaggagttttaggtcagcctggcaacatggtgagaacctgtgtctactaaaagtttaaaaaattagctgggtttggtggcatgcatctgtagacccagctactggggaggctgagatgggaggatcacttgatcctaggaggtggaggctatagtgagccatgattgcaccgctgcactccaacctgggtgacagaatgagaccctgtctttaaaaaaataataaaaataaaaatcaatacaatataacaactatttagatagcatttatgttatattaggtattacaagtaatctagagatgatttaaaatataggaaagaatgtatgtagcttataggcaaatactacgccgttttacatcagggacttgagcatttgcagattttggtatccttggggggtcctggaaccaatactttgaggatactaagagatgattgtccattaaaaatgttttaccataaaggaaacattttatctcttctgtgtcagtctgtgaccttttgggtggaatctgaacaatgtgtaaatgatagtttcccaacagtgtgcgctgatgtgtaggagtagaaaatgatcctttggttttcatataaaaactttcttatgaaacatgaagctaacaaccaagaagattaatcccaccagtgagacacaaggaatgcttaattttggaagtgaagctacttcctcatccctgaggcagcacatacactttttcaataatcctttatttaacaagatccaagaatattaatatctaacagcttagcctaaatttcttgaaaggaccaagcccattgtgttgtctcctgacttgattttcccaaactgtcatggattttctatctaaggaagatgagttccttagttctgggaaaacaccattgaggaaggatgcttcagaagaggaagggatgtcagccagggcagataaaattagcaagaaatattaagattaagtgctatctaagaggtacaaaaaataatagtgtttcacctcaatagaatcttattgttaaaaatacagtgtatctacagttytgaagattatcaaaacacaatattctagccccaaaacaggaaaagaataatgattcttaagaaaaaattctttctgggctgggtagggtggctcatgcctgtcatcccagcactttggaaggctgaggtgggtggatcatgaggtcaggagatcgaaatcatcctggctaacccagtaaaaccacgtctctactaaaaatacaaaaaaaaaaaaaaaaaaaattagccagacgtggtggcacatgcctgtaatcccagctactcaggaggctgaggcaggagaatcacttgaacctgggaggcggaggtggcagtgagccaagattgcgccactgcactccagcctgggtgacagagccagactccatctcaaaaaaagaaagaaagaaaaaaagaaagagagagagaaagagagagaaaggaaggaaggaaggagggaaggaaggaaggaaggagaaagaaggaaggaaggagaaagaaggaaggagaaagaaggaaggaaggagaaagaaggaaggaaggaaggaaggaaaaatattctttccatccattacacactgtaatgtaaaatgatgtgtcccagacaatggtctgtaaaccacattttgtaattccattgtaaaagataatgtagtgcgagcaaggccaaaaatccactattctttggaaaagtgtgccatttaattccactgaagataaggcagttggcacaagtcaacttttccccctggcttagatgtagttgtgcctttcaaaatgagctctctcatttgccaaatacaaagaagagaatagtgttttctcagaggaccacaggatatcaaacataattaaaaataaaagtaagattccctttgaatctagaagaaaactcacccaaatttcttgtaccaaatgaaggtatactgcagattttatcacagtcattaccatgagcagtcaataattccctgaatccctgttggacagaattacatcaggtacatgtgttgtgatgttttctgttttgagttctgtttgttttttatttattggtaattcagataatctcagtttcaggaatttgttttcttctctcctaaaatggagctgatgttcatctcttccttatgttatacctrtatttatgcaccaatttcatagaaaaccatcgtgcattttcccatggaattttgggtgacagtttaagatcagcgtttactataatgggcagacttaaaatggtccccgtgatccctgactcctgaagttcactcccttgtatgcttccccctctttgaatgtcagcggacctttaacctagagaatacagcagagttggccagatatatgtgattccatggttatcttatgtaagattggagtgcatgtcttgctagagtcttttacttccttattgactttgaggcaccaaggggccatattggggaaccccacatggcagcctccaactgagccaccaaagaagtgaattctgccaacaatctgaaggagcctgaaagcacagccttccctggttgagcctcaaatgagactgcagccctagccagtactttgattacagctttatgagatcctaagtaaagaaacaagcataactgagtcaggattcctaagccacataacccgtgagataataaatgtgtgttttaagtggctgtatttgttatacagaaataaaaaatgaacatacttactaaaaaagtttttagctgttgtgagtcctggtaattggatttgttttccagtgatatccatggacactgtgtcaatagtgatgattgatgctgatttgttttactcttatttattcaggatctgggtattaaaaataaattcaaactttcaacaggctgatcacctctgcccctctccctattagcatgtgcatgtgtgtgtgtgtccatgtgtccatacatgagtgaatggatgtgtatttaagcttaatcatgacacagggggttgtttatacagggtttttagaaaacaaaaacattgtctctatgaggcagttccttagaagccaactctcaacagtgtctcagtgtttccctcctgtaatttttccacacattatgcactggattttagtttgtgatactcaggattagtcatgaaaccaagtctttttgtgttctatggtttgaccagccctgtgcaagtctccagggaagcacgaaggacgggtaaatcagagtcccatcccttgaagcatggtggtattagaacatcacttaaagaacagggatacattacccatttagtgaaataatctagaagtcctggaaactaacttagctcacaagatgatattcattagccaatttacttcagaaactttaagaaaatcactttacctcctctgtacattcctccttccctccttccctctcttttcctctctccctccctccttccctcccttctttccttccttccccatattgttattaaatatgctcattattagaatagtatcaaagacactgaggcatttttagatatcttgtgaaatactccttatttttgtctcttcctttagatatcttaattatcaaaataatctaataagactctatttggaaataaagtgaaggagggtaaagttgtgtttttaaataggctgatcagtgctagaaataataggatagttttaaattctagcaattatagatcaaggctccatatactatttctaaaaagtctgtgaacccctgggaattgtgaatgtttcccattacatcctgccaacgattcttattaacctattggtgacgtctttcccagaggtgaagctttgatctgcttgtcatctcacattctgtctcaccacagtctagagcttccaggtccatggggaacaaggatggggcagcagcttccctgtgccaggactgactgggaaattccagaattctatgaccaggtacctgggaagggagaagagctctctgagttacagttagtctgggagcttttgaagtgaaactgtcatagggaaagtgaaggaatttgctttgtgcaatcatcatgccatagtctgacaagacaatggaaaaagaaagaaggaattttctctcaagatgtcaaataattagctgagtcatgaatgcaagcaggtaggcagaaaacagatatttgtagagaacttatttctctttctcctaatgaagtttttgaacaacaacgataaaatggaccttttgcctaagaagcaatttaacaaccattgcttcagtaacacgagaaccaatgtgattagagtgcttgtgctctgtcccctcataaatggttagtattgaggccttataaagaaatataacatctgctttttatacataaatacctacacgtaaccatccacaaataacttacgaatacccataataaacacagaatccatcattatgttaaatgccactgtgattctgagcattttaatatgctgtgaaggcatcagagtaaaacagaaacaagttatatctaaataggaatgcccagtacatttaaagtaatgagacgttttgctaaattcatatgttagcaatatgtcatgtggagtcatgaaggatcagaaataaaaaacagtaattgtccaagccgtcaaggagggatcagaagcaggctttgatcccaggctctgagtagagttgctgtggaattgtagattacatagaatacaggtggcatcaccacagattcctgtttatgtatttaacttgtaacttctcattctgacatcacaggaatatttttccttaacaaagtgaaataaaaagtaaataagctctttaatattgggacataaccaaatcagagggcaacacaaatttacatgggtacttgtgaggcaaaagaaagaaaattcaaaattcacttctaaaaatggacattgtttaaagcacatttaataagtgttacagagtgatgtttcactgtcacctttaaataccccttactgtttctttgggattaccaatttcaacatgaaggtccgagtgaactttgctagaggtgatttgcacaggctcatatgcatctcttcctcatattcagtgacctcacattagcagctttaaattggccatgttgagaacattgacaccacagaaattggcaaaaactagaaatcaagtaacacatgctacaagtctttttttttcttttctcccttcttggaaaattgtaatccagttgttaaatatttatcattataaagtagatccttgttaaaaatattctaatcctcaccaatggttttattttctttctgcctctcttctgctgcccctaaattaaagtaggtctttttatttggggctaagactagttccatcaaaatataaaatagatgaaaagtgttttggggcctttttgccctcttttcctagaccttttctgtttctcctcttgtcaaaatctcacttttttcctttaccttttcagccctgcttcagccctaggtcttcctaaaccagagaattttccaaaaactgcgtgaatatatatgccacaggctgaaatagtcttcccaaaaattagtcattaaaaaagtagagaaagaagatataagttttacatgaaaccctatatagataggagttccttcgagtattttcaaacttgattaacaacagagtaaattatttaagaatgatttaagaaatcaaagtatgagaacttggggctgatccaaagatgtggggattcagagatgaggggcaggcatagaagaggagaagagactgagtatttgtcaccacgtaaattcctgggcgagttgggtaaattttttattataagaaaacactcctttttcttctatataaaatttttttcaagtgagttgctaagttcattgtgagtcatgcattcctttgttcaagtgtggacaaatggtccttattttgttggaattttacactggcagagatcaatggtacaacctggtgaaccccccacaccaaagacacacaggtgtacttaaaggctgatcttctacagtacgcatctatggactggctttggggtgtgttcccaaacactcagagccaccttgagctggggaactggttagtacaagtctctttatgtgtcccttactctacaatcatgcacctagggtcgtgcaaacatcctgaaaccaacccaagctctaggagtcagaaaaggccctgaatgcatcttcaatacaggatctgtgcacacagcatggcctgcttctagaaaaccaatggggctcagaggcagtccagacagaggccttattttaagggctgatagaataggctgtgtttccccaacagcctaccttggtgagtaaacaccaacaattaattcatttatttactcactcaggttagaacattgtgttttcaagtttctaatattaaatttctttttcttttttctggaatagggactatcttattcagctcaaaataccatagactgaggcttaaacaaagacatttgtttcccaccattctggaggctggaagtccaaggtcagggtgccagcctgcatggcgagggttctggtgagaactttcttcttggcttgcagatggcagccttctccctgttcccttacttggcagagagacagagtgagccctggcatcttcctcttcttataaggatgctatattccatcatgggggcccaaccctcatgtgcttatttaaacctaattacttcccaaagaccccacctccaaatatcaacacattgggagttagggcttcaacccatgaattggtagaagggcgggaggtggacacaaacgttccatccataattctagctggtaacatcattgttagaatcagttgccttgccagtctcagaaaacaggacactgagatgcaaagacatgtacatttccatttgaggcaggtgccaggagacaactgagaggacactgagtttagaacattggatcaggcattgagagggaatctgggttgctggatgcaagaggctagtaaggggtgatgagagttcttcacataaatcaacctataactcacccagcctctgtgtcccaggggcctatccattattgatcaaaatgtcagtagaccttttgggttgtgtttcaaagagtaaccattatcttagagattcatagcaaaatatgagtggttcccagtaaaataaatcagagtttcctttatcttagctagaaacacctattgggacttttgtcaaattatttaggggaagaagaaggttgaaagcaaacttccaattgaaaagaagcatatttattgaagttcagagggctggagcgttgttttttgattgacaaaataatgaactctctgataagagtccagaattagttggctgaatttgtattcatttctccataaatttgccaaagttagaagagaaaatccatagaggccaaatgaagaaccatttgattaagcgtgttatcagcctggttgtggccaaattccacctcatatattcatgcacacattctttgctatgagttgcatatgtgctttgtggttgtgggcagatttaggtttgtttttctttctgagtcttttctggtccaaaagctcatcatttaaagttttggaagcaatttagaaagctattagattcccaaccccctcccgacttttggaacacttgcagttatttttttctggcacaaaaacaatcaaaaaggaaaaaaatgtcaggatatcttccaaagagagacataaaggtaacattttatttataccatgatttgtttattcttatttgttgttaccataaaagttatttaatttttttgaactgaaaggcagatgattttaggggataaaaaacctaaaataagaagtgttgctatgtgattacagagaatagttgcttttgttctgcctgtgtttaattaaagcaccatttgagaaattcaagaatcaggtggtaccgttgagtcactggacacatttttaagcaccatcttgaaatgtgatataaattgattttaaattttaaatttgtaatcatacacttcctctaaattgggaatcatgagagcatttctttttaagtagtttgtgataattttggaatttgaaagaaactttaaaggtaatgtatttaaagttactcacagaaatatgctggatgtgttgactggtaactttaaacatgtttatattgctatttttctagcacttgaaaagtaatcatgttttatagccaaagtcatctcctgtccatagaacaattaatagtcataattgatagttttatgcatgaaaattaagtattgctcctgcaaaactgaggagttaatgtctttacgtgctttttcacaaacattccttataatggaacaccaaatgcctacaatttgaacacatggctggtggaaaaaaagaagaaaaagaaaatcaatcctaagccagaaatctgaaaaaagrcagtgactttgggtcattttgtaatcatctttggtgcttcagtgactaaaaaatacatgcagagtgcaagagcaccttgctgaatcctacaccctgccctccttgtgcagttatgttacatgcaactccaaagcctccacagctgttgtctctactctccattcaaaacaatgcacgtgcaactttcccttgtggctggcttcgtcctccacacaccaatgctttgtgtgaaaaggtttcattaaaattgagtttagggtaagtacgggataggtggagaaaagattttcttctaatgcttctccagaccacactgtttagccttcaggagacccaggaattgatatgagcaaaatgtttttacacatgaactgttctttaatcccttttttgcttcttcaatccttgaacttcattccctttcttttcattaacatttacaacacacactttacagggaaagaaagtgaaagatatgtaatgattctgcctgctacatctgactgtactccatttctcacattctatcctcatctttttctagccacctgagtcttcagacagttttaccatcttccctattttaaccccaatttaaacatccacaggaagccaaacaaaatatgcccatctgctccagatgtgtcaaatcaagttctgctattttaatttttttccaggcaaaccctccaacaaatgtataaacaggttgctttttagaagaagtaaagattaatgtctctctgggaaaaaaaaatcccatgcattttggaaagtctggctgttttccccttcaaaaaacttcatgtaaactaaatgcatggcttgatcctcccatgtaccagaaggggagcagcatctttgagctctcttcccaaatcctctgcttggtctgggcgtatcctgtgaatgaggagagaatctaccccacagccagatgcttgcatttggccacagttcatttccaggcagcctggaagagagcatcccacaacattgaacagaggcagccaagatactgtcgggtgatcaggacagctcccgcctctgtgttcctgtggagcctccttcctctccaaggaatttgtcgcatgggactgcataattcagttgtccattcagtcaacagtgatttactaacaacctactttgtgttaggcactgttccagggtctgcgcattcagcagtgagcaaaataacacaaaatgcttgctctcatgaacctggagacagacggtaagaatatacagcrataggcaacatggtaggtggggatgagtgctctgaattaaaataaggcaggacacagagatggagagtgacctggacaggacagggttggcagctcagaagtgcattatctacagtggtcagggaagcctctccagtgaaaggacattaagacggagctgaaggaagggagagagtggatgaaagagcaaaatccctggaactgggacatgcttggcaggttgagtgtccacaagagccccaattaactacaggagggtgagcaaggagagagtagagggagttgaggttagagaagtaaccgtacgtcaaattatggaggactgagtttctcaaactccagtgtctgcgcaaatcccccagggatcttgtgaaacsacaggccttgatttagaagatctgcggcaggcccagggtctgcattcctaccatgcccccagatgatgcccctgcctctaccgttccccagaccatgctttgagtagcagagatgaaggccttcttgcccacagtacaaattctgctatttctttcctgttaatttgaattggtatgcaacaactgtacatatttatgggataagagtgatatttcagtgcatgtatacagtgtgtaatgatcaaatcagggtagttagcatatccttcactgtgaacatttatcatttcttcatgttgtgaacattcaaaatcctctcttctagccttctgaaaagataccccagagtattgttaaccatattcaccctacagtgccacagagcactagaattcattcaccctatctagctgtaactttgtatctattaaccaaactcttttcatctttcactctcccatacccctccctgcctctaatgactacaggtctatctctgtttctctgagttcaatttattttagcttctacatatgagtaagaacatgtggtatttgtctttctctggctggcttattttagttaacatgatgttcttcaagctgatccatgtttgctgcaaatggcagaatttcattcttttttacagctgaatagtattccattgtggatatgtaccacattttcttcatccatccatctattgatggacacttagattaaaggtactctgcttttactatgagtgaagtggaaattttttgaggcttttctttttatgagacaggatctcattctgtcccccaggctggagtgcaatgtcacaatcataattcactgcagcctccactcccagggcacaaatgaccttctgcctgagcctactgagtagctaggactacaggtatgcaccaccacaccctgccaatgttatattttttgtagaggaaggttctccctgtgttgatgaggctgctttggatgcttttaaatagwggggaaataggatcagactcatttttagggagcccctctggctgctctgtgaaaayagggcaagggaggaaataggagacctcctgggagataactggagtagtctgggtgagatacttcagtgccagcatctaaggtacttgcaggtgggacagccacaacgaatgccacttcaagtgaatgtgaggatcagctctgctgcccaygtggaaacataagtaaggttgttacctgtggccttgcagaagcctgcaagtcaaaggccttttgatggttggtgaaaatcacatctgatatgcgtgattccaggaagctcatctgcctcattcctgaatttaatttctatccatgaygcacatattactattgcattaaacgtgaagtcattgcctcctgccattgtaatgtatgcatgctattgcagaggaaatgtttttatctacctcccaaataagtaagcataacttgagctcgcattacaaaatgacacaataaactaaaaaggaattcatttaatatttttaaacatgattttggtgtccttatatttagggaaatattttattgtaagttcatcttacaataaaatttataagggaaagatattttattgtaagttcatctcaggacaagaaacttcacttggcatagaaattaacatccaatctgcagcctgtcattgtagtgagatagtcttgaattccctagctaagttatttacctaaacaaagtcttgttcactttgaatttcctagctaagttttttacctaaacaatcattatatatgtttcaaaatatttaaatttttcccttccctctgattttataattttcttgataaaccttcctaaatatctttaaatttcactgatctaatggttcttaaccaggggtgattttgccccccatcaagggatatttaacaatatctggtgacatttttaactatcgggagttgggggatgctactggtatgcagttggcagaggccggggatggttaagcattctgcatacctgggagggccttccataacagaggatcgttcattccaaaatgtcagtagtgccacatttgagaaaccctggccttctggtgaccacaaggccttcagctacagaaaataaaattcaccaaagatccccacagccatgctttgaaatccttcacagtttgcactgagccatgcttcccacaggctgctccaatgaaggggattactctgaaggccagctttggctcctggattctccaacatccgtgccaaacctttcttatgcagcacagtagcctcagacatttccagctcactcccacttttctctcaggacatttttcctataaaattcttgcacatttaatctcatttagaatctgtttctcagagatcctggattaatatatcatggcattaaatcattgaaaataatgaattaatgatctttcctcattgtagtgatatgggaagaaaacgttctgatacacagaacacagaaatggctcagaaatgagaaactgactgactactaaattgttagtaaaagcaacagaataagtaagtgaaaaatagagcaatttggggggaaaaaaagttgagaaaccccaatcttcaaaaaaaggataaaagtcttagcttttgttcatgtgttatttaaaacccaactcaggcctcaactgaaacaactaaaattaggaaccaaaattgcatcccctgcccattcacacttttggaaccagagtggttctggacatagtcatgaggtcatcattcctaattagagtaggaatttcaattcttgggtttctaacccaaatctcgctatcctcagaaagcttgacagtatttgcagctctgcccattagatgagatctaccctttgcctttggtcaggaagagtcctatgtatggacacatcaccacagaccactcagattccctcttaccttccctaggacactctgcctcccttcctcctttccatgatactcatcactctgggtagactctgcccaggcaacaattgccctctgtggtttgccaagacccatcctgctttctgggaatagatgagtccctctaaagatgggcatgtccccagccacccaccactgtgcaggtggcagctgacgtctattgtcctgcaactcacatatcctgatctctgctctgttatgaactccagccagagaaatatacagatcttattcctgattcataagagactgtgtttgccttggatttaaccaggtctgatgactttcaggatttattatgttgatgaataaagggaaattctctcccttaaactaacacaatgatctctctgaatcagattctccctatacgcagccagcaatactagagaagccccagagacgctgctacttgagggctggcctaccgcagagctggcgtttatgttgtgatgataaacattcttgaaaaaaccctgaaggagatcctggcattttcctagtgcctttatgtgccataccgagtgcaagctgcttttcatgtactaactaatttaattcctgcaagagtcctgtggcatgggtatttcttattcccattttactgacaaggacactgaggctcaaaaagttgtttttttgttttgttttgtttttgagacggagtctcactctgtcgccaggctggagtgcagtggtgtgatctcagctcactgcaacctcagactctctggttcaagcaattctcctgcctcagcctcccaagtagctgggattacaggcacgtgccaccacatccagctgatttttatatttttagtagagatggggtttcactatgttggccagaatggtctcgatctcctgatctcatgatccacccaccttggcctccgaaagtgctgggattacaggcgtgagccaccacgcccggccaaggctcagaaagtttaagtgacttgcccaatatcacaatgttagtaagtggtagaggtataatttggattttatttgaattggaaaaggctgtgatctttctaggtgatattctaggtaacactagtttccagcaggcactctccattacctgcgtctgttaggtctgagtctgctatggttttctgactgatgtgtagggtaacacaattaaggaactctccactggaaggccaagtctccactcaggcacgtaggtagctggcagtcctccttgattctgctagccagagccagcttattgaaaacaaaagcagtctgttaggacagtgcccagacttctgacttcactacggaggctaggaaccaagtcaatatcatcagtcattactttccatcaacctctatcatttacatgcagtaggtgctcagtaaatgctgataaattcctgtatgaataataaatgaatgaacaaacaagagcatttgtctgtacaagttacagagttttagaatagaatgtaagtgtgaagctcgataaattcaaacttctgcaatatccccaccaagtggttatctaaattccgtttgacttcccttggcagggaatacgcacgcacactttctaaaggagtttttccacttcatatgactctggctgttcagaaggaatcactaattaaatgagatctttgaaaaaagtcaagaaactggaaataagtaggaattgctttacctgatgcttatcagcttacaggctttactgctccaaaaatttggttcgatttgaaaacattatgctaagtgaaataagccacacacaaaagggcaattattgtatgattccttttatatgaggtacctagaataggcaaattcatagagagagaaactagaatggagattcccaggggccgtagagggagagtagttattgctgaatgtgtttggggtttcagtatgtggtgaaaaattctggatacagatgctcacatgtcattgtgggtgtctttcatgcaactgaattaggttttttttttgtttttgtttttgtttttttttttcagataaaccatgaatcacattttatttattttgtcctttcatttttttttttttttttttttttgagacagagtcttgctctgttgccaggctggagtgcatggtatgatctcggctcactgcaacctccacctcctgggttcatgctattctcctgcctcagcctcccgagtagctgggattacaggtgcccaccatgatgctcagctaattttttgtatttttagtagagacggggtttcaccgtgttagccaggttggtctcgatctcctgacctcgtgatccacccacctcggcctcccaaagtgctgggattacaggcatgagcctcaacttttattttacgttcagatggcacatgtgcaggtttgttacatgggtaaattgcatgttactggggtttggtgtacaaattattttgttacccaggtggtgagcatagcatagtacccaataggtagtttttccctttttttttttttttttttttttttttgagacagaatctcgctctgtcgctcaggctggggtgcagtggtgcratctcagctcactgcaacctccgctcctgagttcaagcgattccccctgcctcagcctcctgagtagttgggatgacaggcacctgccaccaggcccccataatttttgtatttttagtagagatggggtttcaccatgttggccaggctggtctcgaactcctgacctcaggtgatctgcctgcctcagcctcccaaagtacttggattacagccacgagccatggcacccggctggtagtttttcttcctcatcctcctcccaacctccaacctcaagtagcctccccccaacagtgtctattgttcccttctttgtccccatgtgtacttagtgtttagctcccacttattaagtgagaacatgcagtatttggttctctgttcttgcattaattcgtttagacatggcccctccagctgcatctatgttgagcaattaaaaaaggttaagatgagctaagtgaggtggtatgcatctgtagtaccagctactcaggacrctgaggcaggaggatcacttgagcccaggagttcaaagccagcctgggcaacatagtgagaccccccccatctcttttaaaaaatatttcagatgataaattttatgctgtatgtattttaccataatacaaaattggttgaagaggagtacatataaacacaacaacgaagtgtttaactcatcaatttcagatacacagtaaaagaatgtatatgagaattggtcaaggacattctgaggctttaagcttcaagtcaagaaaaacaactgcctttctgaaaacttacaccgctcacagagtctggtgggctatgaatttgatggtacaacttctaacttgacagtgtggagatcaagggtataggaawggtaaaaagctttgaaaagtttgagagtggagtttgcacagctggacacagggcaccacaaacacaggtggtgcatttgtgcctttggtggacaaagtatcacccacaatgcacaggcgcttccctggctggacaataggtctctctctccatcccctctctctctgtttcaagagaagacattttacgtaggaccttccactctgaatatgaagggtatatcatttccctctcaaatccagactcctctagttgaatggctgacagccaacagaaggggtgtatgcacccttcattaggccagatttactgtccgccttccatgagtggttcagcatgctctctgtccagctgtggctcctgcctgcaaagcgtgccatcagcttcctggttcagagagagctaattttctctaattgcttccaatgagaggtgggaggcaggagggtatgtgccccattcagagccgctgttctcatcagcctcaccaagcagtgagagcagctttcacattcaaggtcttctttccattatttgggtaaaaatgttttgtctcataacctgggatttaagaatcttcaacaggttgcttaacccttaaagatctgacccacctggcctttaatagatttaaagactttatttggttttatgatttttaaaggaatcataattcctacttatttaagaactttaattcctatataagaataatttattctcattcatacttgtaaaaaaagtgtatccattgttttagaaaaggggaaaatagaagacaggttaaaaaagaaaactaaaaggcatttggtgttgcttagatgtacatgttttgtagtatatatatgtggttttgatcataaataatgtatcaaagacatataataccaatttctgttcttttttctgaaatcttagaattgagtccttagaagaaataccaagctaaagggcatgtgaatttctaagtttcctggcacttaattccaaattgttattccaatttctagtgtgccatactacatctttattagcattcaggattatcttcttggttaatatagtaaaatatcattttgttgtttgaattttcattgctttgataattgatgrtatttaaagatgtttaggctctttttttctttttcatttgctcagcttttctgaaaacctttaggagacaagtttctcccaaattttttctactgagatttatgcattactgatatgacttctaacatataagctagttaacatcaagaggattagtctatcacaccacttgtcacctggggcaaggtagtatccagttcattagggtaaaggtcaagtaagtgttttgtttgtttaaaggggaacacgggtaggagttatcccaaagttagaacgcaatgaaacccaactatatagtaaaatayatttggggctcaactctgttagccatcaaaggtagtacaaaacatcagaagatgaagagggttttgaaagaaagaagggccatgtcagattaagaggtagaggaacatcaagataatttttcttctattagagtttctcttttagggtttctattagagtttctctaatagggggtagagaaacagcaagataattttttttctattagaatttctccattagagtttctcacctgcaaggtgttgactttccagttacctggcatttcattctactttttggaatggcctgagctgaaattaatcaggctctgttgatgatgcatccaccagggtttcccaktggatgcttagaaaaaattccatcacagaatatctgtgtcttgtcttcttgggggctaggagatcccccaaatttttctcttctgttcttgtttgataaaggatgtgtggaggacctggtgcttragagtttcagtttgacataaaggtactagttctggagagtctcttgggccactttatgttaacaaagactctcttgatcagcctttagttaagcttctctgagctctctccttgactaggcttcaaccttgggcttctgtgtcagtccttgtggagtctggttttagcaagaatcttgcaaagtcagtttagagagaataccccaccttttatatctgatcaatttcctcaatccccacctgtaatgtataagcccttgacctgccttgagtagaaatctcctacccttcatgtctcctcctagtaattttccatccactgaccccacactctgctctttgactctaaatcttcatttgtccttgttgtcttcaatgtcgaggccaatctctttcccctaccataatatctctattgaaatagtcctgaacaaagtcttccttgccattttcacacgtgccagaataatgcttgcctccctgcctgcctgccttccttccttccttccttccttmcttmcttccttccttccttccttccttmtttcyttccacagaatctcgctctgtcacccaggctagagtgcagcggtataatcaaggctcacagcagcctsggccttccaggctcawgtgatcctcccagctcagcctcccgagtagctgggaccacaggcacatatcagcacgcttggctaattcttttttgccttttgtttgtttgtttgtttgtagagacaaagtttcactatattgcccaggctggtctcaaactgctgggctcaagcaatcctcttgcttcaaggtcccaaagtactgggattacaggcatgagccactgcacccagcctcacaattttttctttaacaatgcccagagcatatgctgagcttcccgtcactctctggggcggaatggaatattacacaactggcacggtaaagaatgcacttggttttggtggtggataacattttcctttgcacctgaagcacttccacaaatagcccatttgtcctccttgcaattaaattagaaaaactgtctctaagcttggtttgacctatctgtagctctttgaaaagactgcttgatctttcctcactctccgtgtacctaaatcttgttcaggctctgtccagaaatcaataggaaacataaaaccttgaagcattataaaatcaggcattctaaactggaaagggcctttgattatttagcccaaatgcatcacctgttttacagacgagcaacctgaagttcggagagstggaacttcctccaggtcatctgctgcactggtgatagaggcaggactaaacactctcggtgcagtgttccttctctgagtcatgttgactactatatgctcattcacagtcacaaactaaaaatctcagacaagtcaaaagcatacaattacaggaccagaagactcctcagtgattatctgggagtccaggcatccaagggacttgaccaagtttttgcagctattgctggtagaccaagtacggaaatacacttctcttgactctcagtctagtgctcctttccctgcagtactctgtgcaataccaaaagatatggatctccaggattggctgaggttagcaattaatatggtatttttagtcatgtctacttggagtagggggtgctgatttttgtttcatgtgtgttcttgagactttttgatgaggttccgtatgcctcactctaggtgatgtttttattagtaccatgttgtcttcctataaagagtttttatggcgaacagaaagctgtctggattcttgctatggttgtaggcaggagggaacatggtgtgtggcttctgaacaaactctggctgctctttaagttcaatgaagtgaaaaaaaggcaagttaattgactacagacatatgcaagagagctctcaattgagccataagatcttttggratgtgggtgtttacaaggtagctataagcactctcataagtactgcacctgtgaatcatggactttcattgtacatagctttccactgcttgcttcttgaggctactgttcagcccatcagtaatttttaaagatcctttagaaagttatatagaggaatgcaaatgtgagtaaacaaggcgcctctacctactgatggcatcttcaatatttacattggcccgttgagttttatcagctggatattgctataaaacacatcacctgaaaattaagtggtttgaaataatgagtatttgtagttgttcacaaacctgtgggtcagctgggcggtgctgcagatctgaaccaggtgtggctgatcttgaatgggctctttcctgctgcggaaggcagccagcaaggtaggtgggggctgatggtcagggatggcctcactcctatgttttcccattggctgactatcagccagggctgcagtgatgactggtgaaatagtttggatatttgtccactctaaatctcatgatgaaacttgatccctacagttataggtggggcttaataggaggtgtgtgggtcatgggggcagatctatgatagatggcttggtgccattctggcaggatccagtgagttctcactcttagttcttgagagatctggctgtaaaaaagaacctggcaccttcctctcctctctttcttcctttctgtctggccatatgatgcctgctaccctttaccttccaccatgagtagaagtttcctggccgggcacggtggctcacgcctgtaatcctaacacttagaggccgaggcaggtggatcacctgaggtcacgagttcaagaccagcttggccaacctggtgaaaccctgtctgtactaaaaatacaaaaattagttgggcatggtggcgggcacctgtaatcccagctactcaggaggctgaggcaggagaattacttgaacccgggaggcagaggttgcagtgagccgagattgtgccattgcactccagcctgagcaacagagcgagactccatctgaaaacaaaacaaaacaaaacaaaaaaaacctccatgcttcttgtatagcctgtagaactatgagccaaataaacttattttctttataaattgccctgccacaggtatttcttcataacaacgcaaatgaactaagacaacaagtctctgtgttctccttcatctatcatactacccgaggtttgtttacgtggtaaagacaaggttcggagagaaatggttgaaaccagcatagcttcttgagacacaatgacacttatgccacatgctattggccagagcaagtcacagaacatctggattcaagaggagggaaatggattccacaccttgatggaggagatgcaaagtcatatcacttgggacatggatacagggaggggtgcaatttgggatgtttttgcaattaacctaccacaggcttaaggaggcttttaggatttaccttctgctctaatgagtttcaaccaccatggcttagagaacatttcttaaaactcagtcatctttcatgtatccattgttctccaaagggactaagttttgttccatggtcagtcttttccatgtgttcttggaccttatacaaaacccaagcctggaattacagcacctggatttattcatcaagcattcgccagttcctggttctatgcatgtgttcacaaaactcagaacagggcattcctctgaatagagaagaaaaatagagtcagtcagaaaagaaattttttgtctaagaatacaatccaccgtactaccaccagacttggttccctttcaatgtcgagagtaacacattccttttatgtgttgcttaatttgcttgttttaagcagttccttgtttttggagtgtcttttttgataacattgagataccacatccactgatcatgtctaaaagctgacaatttctgaaggaaataaactgttcaaaattaactactctctcactatatatatagcattgtattttcagtacacatttttggtacacatattcgtggtacatattttccagctggcttgtgctaatgtactagtgattagaaccaagactaagaaaaaagtgcattgccattttcaatcaacgtgggtagagctgaatggttgattccaaatcaagttattttgcctaaagcaagacagataggagagagagagagagagagataatacagagatagataatcacaaactgccatttagagaaaatcattactactatcaattataagagtgattagcaagtttatggatagcatgatggctagcaatctttatacaaatgtggctgattttcactaagtcttttaattctcagaattgtttcatgacttttttggagaaaattgttgaggcatgaaaagaatttcatgactgagatagatattgtaccttaggaaatataaaatttaacaaatctgtagaaaaggaagacttaggctttgactttaaaagcccattccacttacaagatttcattttttgtttattcaatttggaaagcacattttcttatataatcaataagaagatttttatggcatgctcgagtgtagtctgattccaggtctcataattcctttgcactcaaaaaaggaactttgttacatcttgccactcatgctcactcttcagtgggcaaagtgactttgccatactgtcaccatccttgagccactgcccggtccttgaaaactaggattcttcatttccttttgcatcgtcagcgtgaggaaggggagggggaggtaagattctggacagctggactgaaaacaatggaaaatccctagtaacagcttgaatcactcactagcaggaggaaaatgtgactcgtttcttttcctctttagcttttgttgatttttttcataatgagctcagaaagagggaaagatcaatattcatgttgagttggtatccatcatagtgatattcagtgattataactctccaattctcactaggacaaatataaccacgcaaactggctaactgcacttgctggcatggttcctttggaaactcctggatttctctgaattacaaacagaaggagagttatagattttgtctctttaattttctgtctcttgaaatctcagatcacaaaaattgagtctttcttaactggtgatttcttattcgtcaatgactccttaaaagatatgcagaaagtaatggccctctaacccttcacctttgtaagctctttaatcctgaggggatggacttcctgatttctgttctctcagattctaaggaggaaaagactagctgttgtctctcaagtctacctattgctgtcctacagagcaaggacccctcttgttctccagctcctcaggaataggattcttggttccctaactctaaaataggagctcacaaggttattgtcaaggacaaatgagggcagtgttaacgtattaaaaaaaaaaaactagtcagagattgcttgattttcaaacttgatagtatgctttcgaagttacataatcaaaattatagttgtatttaaaatgttaagttcagcttacaaaccttcttaacctatttgtaagtcaagcaaattttaaaaatccttcttaagggaagcttgattaatgatttcttctcattttcaaatgtagttaaacatttttaaacacttaaagcttgatttgtaaatttaatacatttaattttaagtactttagcttgtctaacttaacaaatgagatactcatgaatatttgaatagctcatcaattagatacttataaatatgaaatatagtttttaagttcttttaaagttctcaatgtacttgtaaacttgtaaggatttcaggtcaaaacgataagtttaaatcatttactcgatttaacattttaaattggaagcacaattctaattcactattattttaataggccaaaatatcttaaaattacaagtatataaaatatcagggccaggcacagtggctcatgcctgtaatctcagtgcttttggaggtgaagccaggagaatcactcaaagccaggagtttgagcccagcctgagcaacacaggaggaccctgtctctacaaaaaatacagaaattagccagaggtggtggcatgcacctgtagtcctagctatttgggaggctaaggcagaaggataccttgagcccaggagtttggggctgcagtgagctgtgatcacaccactgctctccagcttgggtgatacatcaaaactctgtgtctataaagataataaaataaaaatatgactaatgcaaaattatttgatactatgggtttcatttcatacagtcatatgaaatgaaataattatgtatacaattatatatatatacatatatatagagagagggtgtaaatatataatttattcttaatgctcaatcttatcagagctgaaagatggttacccatgaaggaatcaatgacaccatttcacatatgattgcagttaccattcccttgtagktgctgggctagctctctcagctttccgagatttttttgaggctcagaggacctcctctcctgaatgagaactgggttctaacgaatgaccctaactgtgccctgttacagtggctctgtcttatgcccacgtgaagtgatgtcacagaccatattcacgatatcgaagctacacattactaaaccttctgccgacccacagaagcccaaaactcccatcctcatagtcatatcaatggattagattttattatatttgctgcaaactctttttataatgttcttcctactcaccttattcttatgtctattctattgagatctaattaaattatgaatgtctcttaagactctatctggctttatagtgacaacatcaaaggatatttgtattagttagggttctgcagagacacaggatgtgtgtgtgtgtgtgtgtgcatgcatttgtgtgtgtgtacacaagtcccaagatgtacaggttatgttggcaagccaggagaaccaatggtgtagttcccgtatgaaagccagcaggctccatacccaggaagagctgacatttcagttccagtccaaagtcaggaaaaagccaatgtcccagtttgaatacaatcaggaaggagaagttctttcttattcaggggaaggtcgccattttgttctcttcgtgtcttcaactgactagatgagatccagttacatgaggtagggcaatctgttttagtcaatttatatttaaatgttaatctaatctaaagccaccctcacagaaacaccagaataatgcttgaccaaatgttgggtctcctcataacrtacaaagttagccatcacgatattttcctggcatacactgtgaaaccactgacctggaaccctctgacttctgtcagctatttaatagataagtctttctaatcttgagtgtttgtaaagcagttggatataaatttgaaaatttttaaatgaaacgataaatcatgtgtgacctcttgagcctattaatcctaaagtaaaaagtccttgtacaaatttttatccactttttttttttttttttttttttgagacagagtctcgctgtgttgcccatgctggagtgcagtggcaagatctcggctcactgcaacctccacctcctgggttcaagtgattcccctgcctcagccttcctctcaagtagctaggactacaggtgcacaccaccactcccggctaatttgttcgtatttttagtagaaatggggtttcaccatgttggccaggctggtcttgagctcctgacctcaagtgatctgctggcctctgcctcccatagtgctgagattattgctatccactcttgatactgtttggcatgtgacttaaaacaagcaacagttgaaaatataaactagaaaatgagcatatatgttcattgttgctaaaggcttggtaccagcaccagctacaggagtttatagcataccttctcagagaaaggcctcttcattctgggtttagaggtgttggtatcctctgttgcaagatgttattcaatcaattcaatcctgagttttcaacatcagcaacattacatgtgcatttacaggaagaagaccagagtaggaacactttcattttttcccccaaccatctacaaaaatgaagattacctgaaatgtttactttatactatgatcttaaaactatttattttaataatatctatataacccagatcaagaaaaccagtgaaaattagcctattcaatcctttcaaaaggcttttttattccaaaagattgaataaaattagttactccctttatcctgaatttcactacaaatattacatttgcaaatgtcccatctgactgtaataaatgccagtgactttaactctgtggttggtgatatgaagaaaaccatatgtgatagattctaaatatataaccacaaaagccaaactgacggtttggaacatctcagcaactattattgattactacagttgaagaggttgaatcagtttgcatggcaattctcctcctcttcttcctcccatacccactcctcctctttcttatttttctctcttgctytctctctctgttctccattcgttgtttctttctaattcgcagtagcagtagcagcaaccagaaaaatatttgagaactttaaactaaatggttaactaataaggcaataaatagaaggtgtgacactgaacgaggagtaaaagccaatgcattccactacattgagagacatttatgaagtatattgagttacacagacactaacattcagaaacaataaaatagagacagtgtaaaaggctaaaaatgggctgggctcggtggctcacgcctgtaatcccagcaccttgggaggccaaggcaggctgatcacgaggtcaggaatttgagaccagcctgaccaatatggtgaaaccccgtctctactaaaaatacaaaaattagccaggtgtggtggcacacgcctttaatcccagctactcaggaggctgaggcaggagaatcgcttgaaccygggaggcagagtttgcagtgagccaagatcatgccactgcactccagcctgggcaacagagtgagactacgtctaaaatataaaataaaataaaataaaataaagactaaaaatggcccccaaaagatatcaggttaaatccctggaacctgtgattgttccgttatatgataaaatatatgatttagttaaggatccccagaggaggagcttaatctaaattatgaatgtagtaaatgcaatcacatgggttcttctaagagagacagggggtgttttgagatagacacacagggaaggcaatgcaaaaatggagcagaaggggttatagctaaaaggaatgccaagggccaccagagctgtgagaggcaaggaacagatttttccctggagcctccggaggaagcaggccatgctgacacattgattttgtccttctggcccccagatctaagaatatatttctgttgtgttaagccagcaggtttgtagccatttagcagccacagaatactaatatggacaatgatttctgagaaaataaaaagattattttgagaaaataacaacattccttgtttgatttttaggaaaagccattttattttaatttttttctatttttttatttttattttttacattgaggttctctttattttttactatttcttttttcttttcgtcttcttttttttttttttttttttgagatggagtttcactctgtcgcccaggctggagagcaatggtgctatctcagctcactgcaacatcygcttcccgggttcaagcaatttcccacctcagcctcccaagcagctgggattacaggcaactgctatcatgcccagctaatttttgtatttttgtagaaatggagtttcaccatgttggccaggctggtcttgaactccttacctcaggttatcagcccacctgggcctcccaaactgcttggattacaggcatgagctacagtgcacagcctatttctgactatttcttgacggccatccatgctgggggaacaccctcatgtgcctgtcaagcccaaatcccactctaaaaattcagattcccttttctgactccgtaggatgcctgtccacggaggtctcataaatccccaagcccacattttccccaagtcctccccctgctggttacctttcctttcccactcacatggagcaggtgtccgaaacaatgggttttgggcagaaaacgcattttagtcaactgttgtataaatattctaaactagtaattaagattttaagcatgtgctctggctggtcatggtggtcagattgcaaacagttggcaatcttatttcagcagtagactagaatctggtcataatttatccaagggaaaaaagacttgtcattaaattctctccaacggtcctaaaattttaatttatccacgcctaccttgtccattactgttttaaaacagctttttaaacgtctagattccagccctgtgtagaatcaaatatattagaacttagtcttgttacttggtctgaattggaaacatttccagtgcctaccagttgcacacatcattatccactcataattagttgtttaatctgaaaagagcaagttctgctccatcacctaacatctgttcacttttactcttagctctgttcaaccaaatcccattattgtcaggagaggctctggcagacttgtatcatttacgaatggtttctatttctttgtagatttctaattctttgttctcgtagctgctacattctctgataataaataacattatgcagttatttttcggaacttgtgcttgttttcaaaataacaagactaagaactaaagatttatttgtctgaagtcacacagtgcctcaaaacatatctcaaacactaaaaatattaacatccacaaactaacacctacttataaaaactctagcaattctgagagaaatggattatttacaatcctctctctgctgatgttactgttaaatgtcatattaactcccagttatactgaaaccattttaaatgttatagtactttgaccttggttgtgaaaataaagtgtctagtgtaattatttagggatagtatagttcctaattaagacaaaattttcagcaaagatgattaaaatttgataagcttttaaatttttgtgtaatttctccaaataatgaaatgatttctttttctaaaaaaatctataaatttccagactgaaatatgcatgtcagaataaaggaaaattttattatggatctgaagtttgctccattttataacacatctagaaaatttggggtactggcagagtgaacccacagaagagattctgatgaaactgaaagtggattggtaggaaaattgctttacaataatctctactacttgcttttcatgtaggggtttgggaattagtctcttatttctacaactttctatttaactgaaaagacctaacatcttataataggattacactttctggtagaattttcatgatacaattcatttaaactatgttctttgcatgttctgatgaagacatttcctatgatggcattttggtctttctatctccagggaagtcaagtgattggaaagaattttaaagagacttgggctgagtgcagtggctcacgcctgtaatcccagcactttgggaggcccaggcaggtggatcacgggtcaggagttagagaccagcctggccaacatggtagaacctcgtctttactaaagatacaaaaaattagccaggcagggtggcaggagaatactcaggaggccgaggcaggrgaattgcttgaacccgggaggcggaggttgcagtgagccaagatcgcgccattgcactccagcctgggtgacagggcaagactaggtctcaaggaaaaaaaaaaaaaaaagagagagagagagacttgatggttttctcttgaaaaaataatctcttagccattttccactgccacgagtacatgtacattgaaattagtgatactgaatttatcattggcaagatatctaaataagatttactgtagattaccagcgcattaaggagctcctggacaaaacatgtgcacattttctggctgagaagtgcagtcattgaagatttgtagaccagaacataacatattgaaccccatatctatctatatgccagtgtgtgtacttacatattaatttctcctatgaaagaggaattaataggaaaagaaaagcaaggaagtaatgttcaaaacttccttaatggccaggtgcggtggctcacgcctgtaaccccagccctttgggggrctgagaggggtggatcacctgaggtcaggagttcaagaccagctgaggtcaggagttccagaccatcctggccaaactagtgaaacctcgtctctactgaaaatacaaaaattagctaggcatggtgtcaggtgcctgtaatcccaactacttgggaggctggcacaggagaatcgcttaaacctggaaagtggaggttgcaatgagccaagatcctgtgccatggcactccagcctgggcgacaagagtgaaactttgtcccaaaaaaaaaaaaaaaaagcttccttaaaaacaaaaaaagcttatgttgccattatttgggctattgatttttttctagtgcaaaacatatacatatttgatatataaccttggaaaatacacaaaagacaataacaaaacactcaaagtcctgctatctaaaaataaacactttgcttctagagttacttttattcatatttttaaaacatatttataggccgggtgtggtggttcatgcctgtaatcccaacactttgggaggccaaggcgggtggatcacaaggtcaagagatcgaaaccatcctggccaacatgatgaaacccccactctactaaaaatacaaaaattagctgggcgtggtggcccgcacctgtagtcccaactactccggaagctgaggcaggagaatcgcttgaaaccaggaggcggaggttgcagtgagccaagatcgcgccactgcactccagcctggtgacagaatgagacgctgtctcaaagaaaaaaaaattatatttataattatagtgagtattccatttctgtgtcctgcctttttgtatttatctaaaatttaatttaaaaatttctagatttctctgtaaaatcctgggaaaatcaaggcaagttcatagtgatctatgagtaatctattgaaatagcttggcattacataaaagcaatcccttcaggtctgaataaaaccataaatagaattttccttttggcatttacttcattttagactcatttaaatagtaggtttatcaatgcagtttattctgagcagagggatgatgtaatgtataatcagttactcaagtcaaaatgccaggaaagtatatgaataggtagcaacaaggtattgggttgaaaagaaaatgcttggctggctcttagatggcttgccctttagttgctactttccttggaccctttccagggtctccaagcatgaaggacccatctctcaggaagaagtccttgcccagggctgtttatcttagttgagtacagccaagtacaaaccagagcgaagttgggtcttgatctcctattgggtgccactgtctctgctttcttttatggctaacaagcctatactaccacaagccacatttcatttgatagcatgggtagtggaagagagcatccaaagccagtcaatcctaaatcatgtctgcaaaaatatctgtaaggataaggcctggtggacctcaagaactgtctccctctagtaataatcatataacattattattttkcagtgaaaaattatccagtacacaagcagtctatgcaatgtaatgagaagaatgctttgcaactgtactactagaagcgaactaattcatgatttatttttaagtgattagaacccttagtttatctgtgagaacatcacttaaataaaatgttttaaaatatgcaatgcatatgcaatagcattaaagtattaaatagcatcttaaagagcaaaagaaactattaagaataattaagtggatttattggctaattggtgtttccacatgtagttatttctgcaattattattcatttgctgatttacatagagctattctctaaaattactctggcattaaatgaagttagaagacatctccagtttggaaaatctattaagcaaakccttttcaacttaaagttgaggtgatactgaatcaaggcctggcagaactgactayagactcagagggagtatgtttattgcttttaattcttcctatttctgtttgaactaacatggcaaaggctttcatmttccaaactacacttatccagtctataaaacaaagatgatattgtttcaactataaagcacagattaactttgggaggctgaggcaggcagatcaccagaggtcgggagttcgagactagcttgaccaacatggaggagccccgtctttactaaaaatacaaaataaccgtgtgtggcggtgaatgcctgtaatcctagctactcgaaaggctgaggcaggagaatcgcttgaacccaggaggcggaggttgcagtgagccgagactgcaccattgcactccatcctgggcaacaagagcgaaactcagtctcaaaaaaaaaaaaaaaagaaaagaaaagaaaaagatcgggtgcgggggctcacgcctgtaatcccagcactttgggaggccaaggcgggcggatcatgaggtcaagagatcaagaacatcctgaccaacattgtgaaaccccgtctctactaaaaacacaaaaattagctggggatggtggcatgtacctgtagtcccagctactcaggaggctgaggcaggagaattgcttgaaccagggagtcagaggttgcagtgagccaagatggtgccaatgcactccagcctggggacaaagttagactctatctcaaaaaaaaaaaaaaaaaaaaaaaaagaaagaaataaaaagcaaatactaccaaattcttacctaccagagttacgactgctataacccttaacatttaaacaagggaaatcatcatttgggaattgtatttcctcttcatacaaactagtcttccatggtaatagattggctggatgtttttccagtatgttttctagataaatagtccttggagccattgtttccctaagaattaccaaaaaaataaaaacagaaagcaaaaacatgtttgctttctgctggaacatacatctcaggcagtgccgaggactaaagataaatttgatacctatggaggaatacattctaaaaataagattttatatctgtttgcatgttaacaaaacttatttgtaaagacacacattctagaaagtaacctcaaaagtactcttataaagcacctcattttgaaagtcaagtagagcaattcctgggcagatgataatgatactgcagagacatgtgaagaaggaaaaaaartaataatttcgctccctgtgttagtctgttctcatgctgctaatgaagacatacccaagactgggcaatttataaagcaaaagagatttaatggactcacagttccacatggctggggaggcctcacaattatggtagaaagcaaaggaggcgcaaaggcacatcttacatagaggcagtcaagagggcatgtgcagaggaactgccctttatcaaaccaccagatctcgtgatacttattcactatcacgagaacaggatgggaaaaacccactgccatgattgaattcccttccactgggtccctcctgtgacacgtgtggattatgggagctggaattasagatgagatttgggtggggaaacagccaaaccatatcactccctaagactattacatttcagcagttagatgaagagagaaggacagggttcagattgaatcattttggatggaggagaacatataaataattgaacaataggagcaccacctagtttagagacaacctaccacaggcaaatacctcacatgacttcattgttctcccccacaccttctctaccatcagatttcacccagaaccctcatgtgccacagaacttcaagtaaataccagccctggaatactagtcagaaagctgaaaaaaacgtgcaatatgagtttgaacactctgagatcgttaacacttttttcaataaggttagataactaagatgataaataaaaatattttaaaacattaataaagaggaaatgattctcatagaattagtatagccaaattttatcttcttaattgttgtatttcatcaagagacatagataggattaattttggttttctactataactgcttccatcagggaaaatagattaatttctaaaataccaccagaatcttagagttgtttatccaagaatctctaaagacactttacattgcagagtaagtcaataacatgggcaaatataaagctagggaacatgtgaaaaataaaattatgagttacaaacattaaacattatttcagtagaaacagattggtggctgcagttgattattaaagaatgccattaagttgtcaggaataactgttgtagttttctgaaaatagtcattttgttgtagctttagattggattagctagagctatacacacgagagatgcacatcaggccttagacacaaattccttcaggaaaatgattcactggctatttagggggttgacagccagtatatgttgttttcgagtcacagagaaaattgtatggttgtatattctgctttaatttacatcaatggaagatgagctacaaagcagctattgatacaaaaggcaaacccattgtagaaaatgaacattttctgtaagctacatctacattcttcctgatcagaaaataatacagaaagtgacatacttgttcctttttcacatttgaagaaaatgttacaaatgcctccatgatgcaattctgtatttagacaatctaagcattgagtcttgggatacttattctgtaactattttctaagaataacctgaatagaaaacatggaatttggtagtaaaagatataaataatgaaaataggggtagggtcctgtgcctcagtgaagtttaaaatttaattgaacttctaaataaatgtttaaaaatagagcagtttcaaaaatacaaaagctagaatattcatagacccctgaagatacttctacagtatcccacagttccacaatctctgattcaggaaattacattaaaagttatatgttggcattttggaatttcatttggtatacatacctgcagacagaggcaataaaatcacatcaatggtcggttacaaatgaagtcatccagttgacccagggtatgctttggctaaattttgttttagatttkccctaaaatataattgcaatattgaatatctctaatagatctcaagggccctctattagtccattttcrtgctgctgataaagacatacccaagactggacaatttacaaaagaaagaggtttattggagttacagttccacayggctggggaggcctcacaatcatggtgaaagtcaaggaggagcaaatcacatcttaggtggatggcagcaggcaaaaagagagcttgtgcagagaaacctccattttgaaaaccatcagatctcgtgagactcattcgctatcatgagaacagtgcaggaaagaccggcctgcataattccatcagctcccacgggttcctcccacaacacgtaagaactgtggagttacacttcaacatgagatttgggtggggacacagccaaaccatatcaggcccactttgcaaaatatcaaaacagaggggaaaagtataagtaactgaagagaagggtgcggtgtgctgaatacaaagatgctgactggggggagtgaatgtacctgcatcccaatttgcctgggaggtctggttttacccattgtctgacattctgtctaatttagcatttgtcctgaatatttcatttagtgatgtattattgttattagttgcattaaaacaagccaagatggattaggtagacctccacgttgtacttccagtttcgtcatgttatggtcttgggggtgcaggaattcccaggtttccttgaggtgaaatctgaaagctgagaaatatagcacagctcacaaggaagaagtggataaaacagtgtcctcagagcagccagggaatcctaacccctgacgatcttcagtgaggcatttggtactccaacctgttgtgccttagccctgagccccagtctgtgaggtgcatatggtcctagctaataggtcagtgggaaaagggagaaataataaacgaggctgtgtgtaaacttacgtgtaggaaacaggttaagctgttctgccctgttgcatgcagagagtagtctgaatgctattgccacagtggttttatttttattgtgtgatgtaaccatatgccaatttttttctttgactattgactcactattttataatgcatccttctggcaataatgaaataaaaattagtaaacagaagtaactgtttaatgaaaatgaagtatttgtatttctatttatcaagaaagaaaagacgaacctgtggcatgcagagagtagtctgaatgctattgccacagtggttttatwtttattgtgtgatgtaaccatatgccaatttttttctttgactattgactcactattttataatgcatccttctggcaataatgaaataaaaattagtaaacagaagtaactgtttaatgaaaatgaagtatttgtatttctatttatcaagaaagaaaagacgaacctgtggccgagcacgggggctcacgcctgtaatcctagcactttcggaggccgaggagggcggatcacctgaggtcaggagttcgagaccagcctggccaacgtggtaaagccctgtctytgctaaaaatacaaaaattagccgggcgtggtggctgatgcctgtaatcccagctactcagaaggctgaggcaggagaatcacttgaacccgggaggcagaacttgcagtgagccagattgcaccattgcactccagcttggggcagaaagaagagaaactcagtytccaaaaaaaaaaaaaaaaaaaaaaagagaaaagaaagaaaagaaaagatgaacatgtaacttacacaaaacacttgttgccatttaccatggggatataatgaactaacattcagaagtcacacatatgctgaagaagcatcaggatctacttcaaaagttaaaaacattaaaaaaaaacacagaaaaaaagagtgcatcttaaaatgacttaacacacacaactgcagaaggtggagctacagaacatgcttggaagcacgactttttatttagatcagatgattgttctttgacattaagttagctcattggcaatttcatgatttcttgtgcatatcccaaaatgaaatgacacctgttaaagtgccagcaccgttagcaaaagaacatttaaaacagaaagtggtgccagttttatttcaatgtcatcagatgttccaaacagaaaatcactccagttaattcttgtaatggtttcgttttctcatccaattccgaggaagaaactaaagctttttgaaattaattctgttgaatgtattattcatactattttaaattcagttaatatttagcctacatttctagcatttgtctaatattaacacagtttttggtggagtactgcatcatgaagaaacctaacactctgaaatttaaagatacgaaatttacttggaaatagtttttatgtacatataattcatacttacatccaaataaatgttgatagtctctcaattaaaataaaagctgtaagtttcaaatttttgaaataggtacatatacaattggatcatctgaactgtgaaattttgttaggaaggtaatgttgactacaaaaaaaactcagaatatcaggattcactttttctctctgctgcctttcttcggttggattttagaaacgttcatgagtgtttaatcttctgtgcttttaaaattcttctgagtgtcttaaaatagtactgaagttttcatgacagtcttttcatttttggctgaatattgttttaaaatcatctagaaatctttcatcaaagtaccagtgaatggaacagcaaaagctaaagatttcaaagcttttatcaaaatgcgattttcgcaaacaaattatgaaaataggaaggcatggatatgtatctgcaaaggcaagggagaaactaaagaattgtagaataaagctcaaatattataaaatatgtaatttgaaaactccaattgtgttttgaaatattcagtttgtgggaataatagtttgatgaagtttcaatttttaattaaataaatttatatagagcagatataatgaaattgaagacttagtaaaactttcaaaaaaatcctaaagacagtttatttgatgatttttgacttttaaatatttgttaatgaaaagtattcttagtaaaaaaaatataaaatatttgggctgaaatatttaatataaataattgaattgaaaatattttctgtttagcacaagctctgagcttgttaagtaccttgtgcctgtgggagaagctagtctttaaaagtttaaatattggccaggtgtggttgtctcacacctgtaatcccaggcgtgattaatttgggaggctgaagcaggcagatcacttaaggacaggagttcaagaccagcctggccaacaggagaaaccccgtctctactaaaaatacaaaaattagctggtcatggtagcccacacctgtaatcctagctactagagaggctgagaatctcttgaacccaggaggcggaggttacagtgagccaagaacatgccactrcactccagcctgggcgacagagagagactctgtctccaataaatacataaaaataaaaataaaaatttaaatattattgattaaagataagaatgaattagttttgtcactaatttcatacatattaaccatatcatgccactttgaagaagattgtaggtaatttatgaaaaatgttcaaataagactgtatttttttaaatacttttcttagaaaaatactagtgatatactattaaagacagataaaactttaaaaaattgattaaagtacttgcattctacttattttaatgttcagattgattttatgaagaatttttgcgttagtgaatgaagctttgtgttattttatattttagaaataattctagcatagcatagaatattttataggtatacgaatataataaaaccagaatgttgttcaccagacgaattcttcaaaaaaaaatacaatcttcacttttagtctactttcttactctcaaaagtatcctaattagtctagtgctgaagagtttcaaactcatttaaagagaagtagacaaataagtgacaggaaggattgccgtgtgtatcttccagtctggggtgatgtttaaattcctcagagtccacttagctttgtctcttcaccagccttggtttgccccagtgctgttcatcattttaacaaaaatagatctcacaggatgttcacccagtcacctttttgtagggacaagctttatagtcctagcacttgctgattctttaaatactgtgctttggtccaggggatgttaccttaagcccattttttgtagttagtaaataagacttcttcccaaagtcacgtgcatgttcaagttcttgcattgccagtgtgtaatggataaagacaaatgtatagtaaaaaaatcatgaggcagtctttggktctcatcccagccctgttggctgtgtgatatttggcaaattattttacttctctgagcctcttttctttccattgtaaaatacagagaatgatagttaagagtatttttgtggaaatgaaccaacacaatgcagctcaagtatcttagcagagtgcctgtgttcaataaatattaataaaatgacccttaactcccctcagcaagtttaaaaacaggaagtttccatttcaccatttactttccaattctttgttaaagatggccataataagtaatgagagtgtgcatttgtaaatgtctgtcaccaatgkgaatttacttgagatgactcaaaccacattctatactggaaaaggtgcatttaacgggcaaaagaaaagcccaggccagtttctttctgtatcaaccctgggtaaatctccttaagaaaaaattaacaatcatgatttattcatagggaaagaatttaactacttgttagcattcgaatgggtcctaaggaaactcccaagttaattaaatcagaactttcttcttgagtttgatccattatagtgagttaccagctgggtatcaactgctttcccagaaaggccccattgaaattaatggactcagggctttgttgagtctggacactagagaattggacaaatgacactgtggtttattaaagaattatgactgcaaatacattatatgatgctttctccctctctctccatttaattatgaatctgcctctcaaaagccttgactctgtattttaaagttgacataaatggtaggacgaggttactttttccagtaatggagaaaggaggagaaaggttgctccgaattttgtgatcttgttcattttccgatgaagtttttttgctggtccaaatattaattaatcgattgattgaaaatgctacaaaagaggagccattcatcaaagaaccaaatccagtgattcgtgatctggggttttatcacttatatttctagagcatccttttgcttttacaacttaaatttaattgaaattttaatccctagcaggtttttaataaygggcagcttttgagacattaaaaaacattgctctcacttcccagataaggaggttgtccagatatccttatgctttagggagcatttactaagtgatggtacttcccagcgcacatttttggttttgttaaagtatcttaaaccgcccatgtgtagtcaacttccccttatggaatccattgataaatcatggcaaaaggaaaccactctatggaaataacgtctaaaggagaccctctttatcccggagaggaaaaccagagagcagtcacaatctggctaacataaaaagaaccactccttgatgcaaatcaaaagactagatgtagctaattagacatgggaaaagggtggttctcctgaaaatctggggcctcaggcattttctggaatgtgtacagtcagaacgtgcaagttagtcagcaaagagaaaacaagcagccacacctctcccaaataccgaatagtcatccttcttttgtggttcagaggtgtttgtttgtcttakaatgctgcaacttaaaaccaattgattttaaataaaaatggtaacattataaagtgtgaaagtgtggggttaggaatcatttcccaccctgtgaaaatggctctatggtcacccaggggtgtgtgtgtgtgtgtgtgtgtgtgtgtgtgtgtttgtgtgtttaacctgtgagataagaatggtcaaccagttgactcctcaagaacagtctagattgctacaggcatgaagttgctttgagagcaggttgaatgcccacacatgtaggtttggtagaggtggtggtgaaagcggtgagcatggctgcagggtactcatgccactcactcctttttgttacctctcacaacctctctctgtctccatctgacatgcctccctagactgtctctaataccattagaaacttcagcgcaaattgtgcaacctctccgacactgaccacaaaccctttccagcctcagaaatgttcatagatagatgagggttatcagggttgctcagccagtgaactccgaccacgctgggtgaggctacatttgtaatctgttctggaaaacgggaaccatgctccattttcaacctgcactcacccactcctatttctttctagggtgtctctgtttttttgcttttaaccttgggtttgactttttccagtggacatttctaactaggaaacttgatggtttccacttagattcccttattctccaacttaataaacatcaatacatttagaatccttcgctttccaagactctaactgatttgtggccacagtgatctttaaaattcattagactttcgtcattccattttctttattaaggcatccatatgagctgccatgtgtttgctctctttcatatatctgaatttactgattgttgtctccaaaacatgttctatcttagacactatctcatcctcttctctgccagatattgattattcatacattctctgatcccaaccaccagctttactcattgttatgtctttgtagctttttcttcccttaaatacaaggacaacctattatttccacaattcagcactttttactgggtcttttacctstctaaacccaacaagagcatcaaagcatgatgttgggcttggtgcctctcttccaccattctttctctttttaactccacatgtgtgctggactcttgcttatgatcttccctgtgtagctaccaccacaaaaatgtgtccccggcctttacaaatgaagtgttcagatgcaagccattctcttatagacatggcagtaaagaccaattaaaaaagggggaaaattggtgctacaatgtcactttgcgggagaatgatgtctgtaaagtgggagcctatgtcttgcaatatgctgatgccctggttgaatagaccaaactattcattccttcctctatggcctggggagatctctctccatcacacctcagtgaagacagctttgatgcatttgactgtggtgccttgggcctcccagttttcaatttttatttgtttttttctggtggctgccttcttgactgctgatgtgtagcttatgaaggagtgaaggatgtgccatcccaaaatatggcagattggtatattgagtatttcaagttgaaaacattggagacagtgtagtttcagaaaaggaagtctgacctgtctcttcctgcatgtagcacaccataaagattcctctgggaggggtacccttgccttaccagggcgagaaaatagcccttaattaccagagacttggaactggaggctacactggacctgatatatacacttaacaaagtaacgcttatgtgcctgtggttttacacccccccaccccaaatatctcctagtgactcccctagaaaatgtactgccctggccagattttctttttgctgtcatttcttctcaaatgtattatcattcattgwctaaaaaatataaaagccccttcttcagacttcactgtcttgtgaagatcttcatgtacacgtgaaattaatcaaatgtgtatacttttctcttgttaatctgcctggtgtcgatttggtttctaggtcctgctgaggagcccactaagagctaaaaggaggattgggggtgatcactggctctcctacagttatgccctattgttttttttctttaaataccttttccaacaactcgaagctcagcagtatggtggacttcctcccttgtgcatagatattgttgcatcatttctgtcttccagagaactacacttgctaagttcagaatactttatcagcttactttgtgtccttgttcccatggtggtgacaccgatcttgaagcttaaaaaatcccccaaattccgcctcccacctctgtgacactcttttgcaaaaatatgcaatttttctacacacatttctgacaaaaaggaaaaaaatgttaagtccaccctagktctgtccagacaagcacagagagaggcgtgttagatttccagacaaatattttcgcctagattttgctcaatgaacttgattcactgcagggctttttttcccacaagcgcgtggcagaggtgggctgccacaggagtggccagtgcccgctctctgcagggcactgctatgaatcaccattttcatgaatggaaagaataggaggaggggaaaaaggacaagcagcttgttgctaatgccctcaaacaaggcaaacattttgtgaataatttttagataatatatgacggtttggatctttggttttgttgttttgaatggaatgcatagaaaaaagaacttgtttcaacaaaagtttgatctgatatcctattcatgggctgattctttctcaaatatttggcagctcatccagggcacagaaaaggcacagtgttgaatcatgttgctttcaagctctgtatcagtggaaggcactggaagggattatcgatcccacaaaatacacaaggaaagtatgtgcccacttcatttctgaggaaatttagggttcagatggaccttgccatagactcagtgtctttagtagaggccaaataaataaataagccaacatagatgccaggcaacttaccatacagcatgctgaatttcttccctcatgtctggtgactggttttatagaacccattcagtgagaatgcaggagaagtctaagaattagaaggaacaaagaaaagagaatgagcacgggaataaaagtaaataataatcatgtctattcttgattctggggactggctaacttctgtcactttaaaccacttcacctcatttgaaagtccaggcttctcagcttgatgtccaaggttctccatgacacatatcytcttgagcacttcacttcatgccccgaccaagcttggacttcttccccctcacatgcttgctgtttcatgtttcatgttttagctcatgctgttccctctacctggaacatcttggttcactcaactaattctacccatcagaatttagcacaggtgtcctcctctcttcatggtcttcctaaatacctcttgggttcattattcctcttccatgttcatagatcaccctgggtattactctgtgctagcactttccttctttctgctatgtagtaccagtcaggcactcaggggaaacgactatgccattcactcattcagtcattcattcattcattcaacaaagacgtattggattactattatgttccaggcactgttttagggactgaagataaggtggtgaacaagacagataagattcctgttgtacaggagtatgcattctggcagggggatagattaaaagggaaatcaataagctaacacgttaagtgctaccgataagatgaaaatatgtcaatgggaagaagagtgcctgctgatttagactgggtggtcaggcaaagctttgccaaagagatggctgaagctgagagttcaaatgcaagaaggagtctatgaggatctgggcacggagtgtctgagttggaggaaatgcaagcacaaggccctagaggaagaatgagaactgtgagctcaaaaacctagaataagccatgtgactagtgaacagcatgtcccagcaaaagtcacacttagaaaatatagggcctgagggtcacaggaaaagttgtttattctttacctgatgggaaaccttgggacaattctaagcagggagttggaagacgtgatttatattttgcagaaatcaccaaggctctgcatgctgaatagattttttctttgcatccccagaacctagcacaatgcctgcctctgtttcagtagggcccagagccgtgctgcttttccacacaggaaaattgccttttccaaggtgcatggctgcccagtagagaggaaagctcaaagtcatatcaattcaacacgcagtactaagtctctcctcttgctccattttctactggcctgtgaccaactacttcctaaagttgaaattgcttccgatttcttttttctctatttcatggataatccatgcagtgtttgctcaacctgtttacactgagatgtgttgaggaactgtcccacggcaagaccacaaggtggggcagtaatgagtaattggaagaaaactgcggtaccttctaaagctcaaatgtggctttctagaacmcgatgaagtggagccctacattcattatttgaccttggttgttttttttttttttttttttttttgagacagaggagtctcactgtctcccagactggagtgcaatggcatgatctcggctcactgcatcctccgcctcctgggctcaagcgattctccagcctcagcctcctgagtagctgggactacaggcgcaagccaccatgcccagctaatttttttttttttttttttttttttttttaggagagacgggatttcaccatgttggccaggatggtctgaaactccggacctcaagtgatccacctgcctcggcctcccaaagtgctgggattacaggcatgagccaccatgcctagccctgtgactttttctcaagggcttcaaacagtccctctgcaagttaacctaggcatactcacagagcaagaaggcattcatgataccacaagggaggtgaggtttgtgccatttgctccatgtcactgaggcaggacagccctgtgtggctccattcccacgagagaccgtcttgctccgttaggactgcctcccacctgctaagggtgcttttcttccatggtacagtgatccttaatcatttgtttcaaaaatgtaccaacctcccgggaatgaaactaaccaaacttccctccctccctctctccttcccttccttccttccttccttccttccatccttcctgtttgccttccttccttccttttggattatgttgtttcattaaaatatatttagctgggcatagtggctcacacctgtaatcccagcactctgggaggcagaggtgggcagttcacttaaggtcaggagtttaagaccagcctggccaccatggtgaaaccctgtctctactaaaaatacaaaattagcygcgtgtggtggtggacgcctgtaatcccagctactcgggaggctgaggcaggagaattgcttgaacccaaaaaaagcagaggtttcagtgagctgagatcgtaccactgcactccagcctgggcaacagagtgagattccgtcatatatatattcacatgatttaggaaattctgtatttcagcatcacagtataaagacttaagttctaagagttgatattgctgtagatgttgggaatgraatcttaggagtaacctttaccggaggcaacttctactgcccttgctacctttggtgtgacctgaaaccccctttcttcattagtaccaagtgacttgtttgccactactcagctgtcccagaatagcttgactccacacatccatgcatttctaggaagaaattaggtgcattataaataacgagtcctctgaaaatgccgaagtgtcttaatcttttgaaaaaaattatctcaaatttacattcacaaggagccatgtcttttgccactaactgaaactcagtaacaacactgaagtatgagcttgggccttgtctgacaataaaaaggaaatgctaggtcccagggaccacttcaagatgtgcttgttcctttaaagcagggagttgtcacatccaatttttaacacatatgtatattttaacacatatgcatattttaacacacatatatatttctgattatactgtaaaactggtaaattatttttaaaamatcataaggcccccaaatcccagagaaagttgtttctattacaattttagtctatttgtctcttttaagtttctcttccctctgagcatatgtatctctaatgcatgtctgcttatgtaggcatatttatacatacaccctttcttttacaaaactgatatcaatttttgtattttaaataaaatacaaatgttttacattctttctaaacaagcagacactacttttggcacctcccaatgctggccaggtcatgttaactacccttaatcagctttttttcttgcaatatttgtaatatgcatcatctcagggcaagagacaaattagatcatttgaagattaataaatccttacctctgtttggttgcacttagccagcaaattcatcacatgcttagtctttgctttattctgggccatgtagactagctgttaagtggaaaaaaaaaaaaaattcttcttcggggcagagtggcaggatggctctttggaaagagtcttggagcaggagtcaaatggtctggctttacaccccagctatgcttacaaaagctgggtaacttgcagttcccttaccactaaagtggaaacatggatgtctaaagcttttttacagctagaaaagtctatgcttggttagcattgtgctgatgcaattctgttccagataaccgagggagggaatggcggtcctcgcgtgaagacgtaagtagacgtgctattaccctcctcggttggctccagcaataagcctaatgacctctacaaagctgttctgtaatacagaagtaaacacttactctgcacaatttctccttgcatgtgcttcccactggtagaacattattcatcttgttggtctttccaaagagattcattacttccttgctccttcttattcatccttcataatagaaatgctaaaagtctgaaagaygaggaagggagcacatttcctccctgcagtctgaggaatggctgtatctcttcatgagcaccaagaggaagcccccagatgggtccctgtccttacagccttgtttccatgtgcatttccaccccagcctcttccataatcgctccccatctctatgccccagcgatgccagttgttccatcaaacactgtcctctctgttctcagcctcggagcttctgctccctctgttaggggtgactgattctcaccaccaccaggctaattctgactgttctggtttcaccgcggatgtcacctcctccaagaagctcttctcgactttctgcctgcagaccctcatctaagctttcacaacaccctgtgttctgtgtttacacccacccaactttttcttttttaaattttattttaagttctgggatacatgtgcaggacgtgcaggtttgttacataggtaaacgtgtgccatggtgttttgctgcccctatcaacccttcacctagatattaagccccacacgcattagctgtttgtcatagtgctctccctctgcccacccccctgacaggtcctggtgtgtgttgttcccctccctgtgtccatgtgttctcattgttcagctcccacttatgagtgagaacatgctgagtttggttttctgttccttatgttagtttgctgaggatggtggcttccagcttcatccatgcaaagcactggatatcattcctttttatggctacatagtattctatggtatatatgtaccacattgtctatccagtctatcattaatgggcatttgggttggttccatgtctttgctattgtgaatagtgctgcaataaacatatgcacactcaccgaactttgcttcactgtctatcagaaaactgccagtttttcagttgcatttatctcctagaatataaaggctttgaatagatccaatggtcttgtttaccattgaatctgatacctaacatggaatctgacacctgctagacaccctcagaatgtctgtgaaatgatgtaactctacgtgatgtgtgtctactcatagctgtaaaatgagtgagccctcctgtaggtcacagtgtccagcagactggcagggacctgatatgaacatcacagaggaaaaaaacacatacgaaacaattaatgcttgccattgggccaaatgctttgtatgtgttatttcatttatatttttatttaatactaagcagacttcatgtaccctgtattttgctaggcagtggagtacatagaaaggaacagaaactgcgtatcttgtcttcccaactgaaaggagacgattaacctacttgaagatgttagaatacaaatacatgatatctgaggacagggtgaagaaaaacaaacaaataagaacatgaaaaactgtgtttgtcttgactattcaggatatgaaagtgccgcaacattcatgtatctagaaactccatgaaggaatctacacttagggcttaaagaatcctaagggaccgggcgcggtggctcacgcctgtaatcccaacacattgggaggccgaggtgggcagatcaggaagtccagagatcaagaccattctggccaacatggtgaaaccccatctctactaaaaatacaaaaattagctgggcttggtggcgcatgcctgtagtcccagctactcgggaggctgaggcaggagaatcgcttgaacctgggaggcggagggtgcagtgagccaagatcgtgccactgcactccagactggtgacagagggagactccatcaaaaaaaaaaaaaaaaaaaagaatcctaaggattcctggttcctgacaggtgcttgttccttgaagtatacttgtgccgggaagcaaatcttctctctctcgttttgaacttggaggagacagcagctcccttctccttttcatacaggttattgtttataagagcaatgtgatgaaagcttcctctgctaagactgcaactccagcgttaccttttctttacctcaccttgatcctcggtgtgaaacttcactcattactgatgcattgcaattaacagatctcctctttcaagacacattagggtatgttctgactatcagctccaaaaaaataaaataaaataaaataaaataaaacacattaggaaatttaaatgaattagtgtaatcagctgagatagtacttgaaagggaccgtgtaggcttgtggtggaataggtactttcagacagaagtctctagaatattcctgaggaagtattttctcctgcccttcaatgaatagagtggtaaggtttgtgaaaagcaggcctctggcctgagttagggaaattatatattgtttgtccaaagtagtaaactctgtctaaaatgaaactctagactagatattattttttgatgttagatgtatacgttctctccatgatttagcagactttccagggaatgatgagtctcccctctactgaatactataaacatgttatctcagtgggaaaaatagaaagagatccagagaagaagagggaacatcttgcttttgaagcatctctgcttacgagtccataggaaataaattacatttcccagggttctgatttggtttttaataacttactggccctgctaaacaagacactcaggagaaagtgcatgtgaatagatggagatctacatttttagaaaatatgtttctttcttttgggatcacaatcagaacataggcatcattgaaacaaagccgaggaagaagaattttctcatgctatgcagaagttttctgttaaagatatcagaggctttgcaccctgagagctgtaatcttctctccttgagttcttcattgagatttactgcagaggcctcagatgtgtttatttctattatccagttgctcctaatattacttgcaattgttttggcatgagggttagaaattgcaagaactcctagctcgaaatcacagaacgtacacaaagacaaaacagaaataaagcagaacaaatgcaaggataaaatagataaaaatatctccccaccctaattgtgctcttttaaaggaatgctattgaaatgacaaatgaaggagatttctacctgttgttatatagctgggcagagtgacatttttggctgtattctagtgttgagcagttgcaaagctttctttccccctgaagcagtagagggtgctatgtggatataattgaagagatgctaagtttctatatgacgccagggcttagggactgccctctcttttcaagccacttgcttttcccaaaataactaagaaaagggagaaaaaaaatgagtacagaggccatgctagaagacatagataaaatattaagtcttaagaaaggtaggaaataatcagattctaaagttctcacaaggtttggtattttgaagtatttggcagaaggcaagggtatggaaaactttaagaaattgtaagcttaggactttatcgtaagcttaagacagagatgttatctgtctgaaaacagagggaaaattttgaacagagtgattcttgtaataagagaagacttttgacaagttatgaattccttgaatttcattattttttcttgctgtttaagtagtatatattgtatatttgatgacagtcagattttactgatagagatttgaaatatattttgatagggctacctcatgctttttgtagaatcaaacattttagagctgttcagccccttggagccattaagtacaatcttaatgtttttgcataaggagacattggcaccaagaagttaagtgacttaacctgtaacaggctggtccaaacatccgagcctcaactagaaccagtgtccttacccctggtccaaagctctctgtcttttgctaccctgctttgagttacagcattttatatgctgacaatacataatcctaatacatttatatattgttttcacttacaaagcagtttatgtacatttttccacacttatgtaccaaaacgtcctttgaaaatatgttatttgttgatttactcaaagaagacttgcccagttttatgacaggctgagaagttaagtctcctgttgcaattccgtttgcaattcagtatccattacacctggtcaatcaagtttcttattaatcccacgttttccctgcctgtaaactcccttcttagtgaccgattttgctattttgtgtgagcacttgagtaaaattcaactgactcagagtagggaatcctggctggattaatgggattgtgtaacaccttcatcacttgaggcccagataggagtgactgtgcgatgtaaaaaaggcttgccaacaccactgatgtttgacgtgaaggtgaaaagttcagtggcccagagaagtgctttaaagggttcttcttaaatctaacacctgaaggaacaccttcagattatccagcagttgtgatcccctatgcagtgtctatttgtmtagacttcttccccaacacacattccctagtacatttaaatggaaagaaaggtctgggaggttatttgcaggggtgttgatggaaacaggacccatcacagctagggtcatgttatcagagtgcagattttgaattcctttctgcctttcctgcatgactttaagtaagaaaatggtcaccttaaatttgcccaataagactcagcttggaaatcattcttgggatgcagaaggatctggtccagaaagcttcagagaagccttgagaactgcctattcaagaggrgaagaaggctgagagagggaacctgcaaagatctagcaggaaaagagtcttctatgtgcaaacaacactagaccctttcccagaattggggcactaacaaaagataatgcctctgaaatattgggaaaattgttggagaatatgatctcgttccctatgctgtcactccaggtaacacccatgatgctcaaaggatttttttaaattaaaaggagtaccactttatttaacaggtagaaaattatggaaattattataccaagaaaggacataggctaataacataaattaggcttaaggagagtttcataaattatgtatctccaatggattaatgaaggaaattaggaataatttttatattatctctacttttttacttatatatttggacttgaggttttctgcatataatatgcrcactaatataaatattaatataatgctaatacaaaggaatactctctcagagattgtgcattaatgtatgtttcagtgacaaaatatagtgcgtgaccttagccccaggaggaagaataggatatgtgaaagaacctaagattttgracccaggataacctggttttaagcccaggtctgctacttaagagctgtacgactgtgagcaagttattttaaattgctggatcttgttttcctcatttacaaaatagaaacactgatatctgcatcatacatcatactattgttatgatttttaaattaaaaatatatgccaatgaacctagcaattggtgaccatattgtaggtacttcatggatatctgcctcttccttccatgtgcaaaaggaattctggcatcatcttttataattactaggaattttttactgccttcagaaaatatttctagacttatcctgctaatttttgtttagaagttagcctctgtttcagtccattctctcattgctataaagaactacctgagactgggtaatttatagagaaaagaggtttaattggctcgtggttctacaagttgtactagaagcatggctggaaaggcctcaggaagcttacaatcatggcagaaggtgaagaggaagaagagaagtctcaaatgactgaagcaagaggaagagagcaataggggaggtgctacacacttttaaacaaccagatctcaggagaactcactcactatcacaagaaaagcaaggggaaatctgcccccatggttcaatcacctcccacagggcccctcctccaacactggggattacaattcgacctgagatttgggtggggacacaaatccaaaccatacagtccctgaatatatatgtgcagaaatagactgctcacctagacttcaaaagacatgtcatcattacgcacctctgagacattgtatggtcttggttttaaatttcttgagtaatctggttaattctgatactagcgatcaacagctttggtgtaaaggtaggtcagattggtgatatattgctacagcaatttgaggaaatcaatttcctccctaaaagttttgacaatcttgtttatttatatattttatggtggtgaggggagaaattattcttgagatcttgcttctttgaaatatggttcttctcaggaatatcctatgttattagatgatctaaaacactgtggcacttcttaaataaccaatacttaagataccatgaaaattacaacccccgtgagatatagtatcaattaaactatgccatatacctcgattggttgagttccatccactagtcaatttcaaaattacctcgtaaatcactaagacaataggaaagaaagccttactataacttgccttactataacttgtcttactcccaaatttagcaatatctttttagcttattgatggtatttcaggaaaatcaaatgtagttccacattataaggatggagacatgtgttacctctttatgttcctgtatggcaaattagttgatactctttggtcttgtcgacatctctttaaccttgtaagattataaaggttagaatcatgtttaccacctgtaaaaaaaaaaaaaatctgacagcagtgggttttttttttttcttcttcttctttttctccaccacatcccctgataatgatttccatgggctggaaatactgggaggagagaaatatttagttgaattcattttaaatgaaaccaatagcttcactagtgatctcataacctcaaagcactttacaaactgagtaatcattgaagatgctaaatatagtaaatacaatgtttaaaaccttcacaaataaatccatattaaagtcttattctaccacaaagtagctttgcttttgatataccttttaaagtcatggatttcttgatggagatattgagttgggttgttcctgttgctttttgtttctttgattttttttttttctattatataagctagacctcactctcttagtcatttcattatatgtagagacaagatgctgccttaactagagctttattccaggtgcccaaaggtcttcatttagttcctagctcaattcgtgagtaaatatttcttttccagctttaaaattttttaaatgacattgtcaggcacggtggtgcatacctgtatccccagctacttgggaacctgagatgggaagatcacttgagcctggcggttccagtctgtagtgcacagtgatcatgcctgtgaatggccactgtactccagcctggacaacatagcaagaccccatctctaaaaaaaaagaaaaaaaaagaatgatagcatttcctttacttgtggagattttctgactataacatgcacactattattataaaataatagactttacaaaatataatggttgtagtttcatttgcactaaataacgataaaccttatttaagtgcaaccttattttatatatatatatatatatatacccattaatttgattgtttttaatgtagccatggacatggagagttcacaaattataatttataaatgtattaagatagaataattgcagaatagaaggatttttaaacaatttaaatagtcaccatttctgccacccattaatcctatatattggttctaggacttattcctggagttatatcctgcacattggcttcaggcatgaaggacttgatcccacatcttctccagtgggattgtggagatcgtgtcactgctggcctgtcctgcaggctcttgtggtgatcattataaaagccagccctggggtagctcaggacaggaaaggarggatattctgaaatgattttctccttttagttaacacattttggttccagaacactgagcaaatcatcaactgaagccccatgatatattttcaaagagtgaatttctcttacctgactgaggcattttattctataatagcaattctctgggttttttttttttttcatacttataacaaagcggattaatatatactcacctaaracaccaaagatactgatggctttcaccactctatctaagcaggagtaaacacctgggaactagaaatctgagaaagaggacaacacccaacaccacctaactatggccctcgatacagtcatttaacttaataaccttccgtgagagtaaggtcattatgaaatatgctcggttttacacaaagctttaaaaaaagccacataaaatagtatatgaggtcacctctgattcctatgtaaagaagattcctcctcccttccctcattcattgttctccacactctactccacacctcccctcaccctgcaatccaacttatcaaaagtttaattttccctttccaaaagcaatgtacttgaaattcctattcttagttatgtgcattttggtttcctctttgattttcctttttttccaggtttcctgttgataccaacatgaatctcaagggcttccctttgcttcttttggaaaaaaataaagaaaagagactgatttagagcctatagggtggaaaatcacagccaggaaaaggcaggcatagcatgcagcagttcagagacagggctcacccgcccatctcttccatcagccacctccctggtagggcatcccttggaacagaagccagcaatggtcctgcagggattggagaattgtgagctctaaatgataaaacgttgagtcataggttatcactgtacagagtgatcctttggcctctgccttgagggcacgtaagccattttttccttacttgttggaatttgattcatttcctctttttctcctttagctctctaatctagaattctcagtttatctataaaaggattcaatatctgggttgatcctgaggagtcaaagggttggttttgtgagcagatgggtggcagacaatagcttttgtagagatgcctctgaatgagcccacatggtggggctttgagaagcctagtgtggaatcagtaacaaagtccaccttggaataatagtaccatagtttcagtaactgctgattccaaaaatgtttcctatcacacatcttcctcatctgcctctcacaacaatcgtgtcaggagaaagctaatccaactataaagtggctacgtgatcagaaatgacaggatgggttcattgcaatgtcaagcctcagtagtttttcatcaaagccctcaaaaaaaaaaaaattccaccccaaactgattgtgtattattcaaccagacttctggtatcttcaggcacactgtttgcaaaggccaggcatctcttatgtcctgctgtctgtagacctctgtggtttatggatgggaaaactcaaacagtctgctcttagatggtccttattgcagaaagcaggcttatgccctgtaagccgggggtatctccaaatcgtgcaggaggagaggtactgattgctcatttgcttcttctgtgccttaaaatcaccatccttgttaaagaaatgcaagcattgagtagagaagtgtcttgcttgggcttgcttttgagtaccgggaattcagctttcctgctttggaaacctgagttgggatgtaggtgtgtagcaaaaggaatgggtggaggcttctaactaatggggaaggcatctctgaaacaagctgagatgtggatctgggattctgggaatcaaataattcttcccagcaccaaactttgatgagagaatactttaatgtctgtggttgcagaataaatatgattcactctgaggattctgcactgcaattgaatatgtcagaaaaggcaaataaaaaattggaaaatttatctgtaaatagttctcaatagttttagaagagcttccaaggacattaatttcttcctagccattatttattaaaaccttcaggatagcatctcattttttggccacactaatgtagcaactaagtgtgcaggccctggattcagagctaaatctgactctttcaagctgtaagcccttgagaaatctacataaatctctctgtgcctcattaatgtcaactgtaaagtgaggaataatgatattatgtattttgtaaggttgtccgaatgtttaaattagattataatacttaatattaattgaccactttggaagtgagcattgttctaaatgctttaagtatgaattttattgtcatcgccatccatatcaattatccttatttattatgctgttataagaagctttgatttcacaaagaaagaaattcaacacttaaggaggaggcatgagaaaacatcttattgaggtttttaatcatcttctagtgaaccaagcaagactgaacctttattgcaatgttttactaggctttatagcacttttaaagggtcaggtaaataaagtcataattcaaaacagctgttacggggtggggcacaatggcattgatatcaagagactctagtactgaatcagttacttcctatttatataattaaaaaatttttttgttgttgtttgtttgttttgagacagagacagctctgtcccccaggctgaagtgcagtggcacaaacgtggctcactgcagcctcaaactctcaggctcaggcctttcccacctcagccttctgagcagctgggactataggcatgtgctgctatgcctggttaattttttatattttgtagagatagggtttcaccatgttgaccaggctggtctgaaactcctgggcataagtgattctcctgcctcggcttcccaaagtgctgggaatataggcatgtgcccacacctggcctatttgtataattttgaataaatcatttaatcttgctgagcctcaaaaagcaagctttaaataaagaataaattaaaaattaaaaggttgaattaggtgatatcaaaggttcctttcacatctatgattctaaatattactcagtatttactctgtgcagaatgtctatttccacaggctattgcttacagcacaacacagtgatcatattcctctttcgtaactagggagctgagcaccacgatgctggctactggcagagtttatccctcagcccatattaagtctagaaatgattttgtccaactgatgttttctcttcacatcagatgtcacttttttttttttttttgatatggagtctctgtctgtcacctaggctgggtgcaatggcgtgatctaggctcactgcaacctccacctcctgggttcaagcgattctcctgcctcagcctcctgagtagctgcgattacaggcgcacgccaccatgcccagctaatttttgtatttttagtagagacagggtttcaccatgttggtcaggctggtcttgaactcctggccttgtgatctgccgaccttggtctcccaaagtgctgagattacaggtgtgagccactgtgcccaggcttttttttttttttttttttttgagacaaggtctcactctgtcacccaggctggagtgtagtggtgcaatcaaagctcactgcatcttcaacttcctgggctcaagccattctcccatctcagtctcccaagtatctgggactatatccagttatttaattttaaattcaccacactcagctaatttttgtattttttgtagagacatggtctcactatgttgcccaggctggtcttgaacttctagcctcaagcaatcaatctatctgccttggcctcccaaagttctgggactacaggcatgagccaccacgcgcagccagccatcacatttttagataaaacatcgaggaagtacttatactgatatatacattttactatagcaactatagtaaagagaaaccagtgagtcctaaaactgaatttttaaaaaaattagaaacatagagttaaaattaagattatactcaaagttcttcagagataagtattaaagtcatatttccaaacctttaggcactataaagaattccataaataagaggttatttaaaattaaaaaaacctatgctcaagcaatatctttgatcataagacaattctggcaatgagacaaattcttgaaatctcaacaacactaacatgggctcagatttttgctttcaataaatagaacctcatcaaagaggtcttggaaattctgctagtcaatggaataaaataatgaatcggatagaagtcctccagccctgtgctggaccgaaatgtctctgactgcctgtcatatttcagaggatcgtgctcctcagagcagtgtggggctggcacagagatgaaagaaagaagaggttcctccctggtttctgtttatttgaacctgaatcagaatagagaggaagcaaaggagaatgaatggtgtgatccaacttttcttccatatgtgaacaatattgacttatatggcataattatgcccagatgctgtcgtgacagggtgtagagatttctgacttgcataactgaatatattttttaaagacaacaaagaaaaagaaatcagtcacaacattgctttagcatcttgagtcttggagtgcttctgccatggaaagttatagtctctgctcttttctgcttagactgtatcttaaaactagcttcaatattggatggcctattttaagggagatcctgacacttagtatccaaattacaaaagatgactaggttactgaggatctgaagattgtcccatataagttatagttgaatcttctgtggaagtttaacttggataaaataagcagagaaatgacaaatgtgttcacatatgtgaagatcatccttgtttttcttgttttgttttgttgttttatattctaggaagcacagtggaatttgaaagacagactttagatcaccatattggagacctttataacaattaaaacataggaatggggcaggaagccttattaggtggtgagattgtgagattcctctgctgttgatggagactagacagaggccagatgaatgtgtcaataatgttgcaagcactgcttccatattggctagaaatttggaaggttagaaaaagtcaccaactctatcatcataagaaaactgagttgagggcagaaagtaatatgatatctgggttttggggaaaccagttacctctcttcaaatctttaatgtggaaagaatgaaaccatcttagacctttttgagtacagaatgacttgaagtcagaggaaggagcatggcagacacagaatgtcccaaattgagacagcatcttttaagcaaattgttgtccctttgggtagagtgggaataataatatcgcactcacatttatctcacagatgctgtgagggtgtgtgactcagtgtttttaaagagctttggatacctgctgtggttaatgtgtcactcactgcgaagctttccaaggcaattattttgatcagaatgtcactcagagttagtaggctggcttcatgaatcatttggggagggtagtataattcaaatttgttatgtattgtcaaacatttaaaaagaataatagtataaaacaaaatacttgyttttacactaaaatttaacatcttttttttttttttctgggaaaatagaatgttgcctaaactgaagtccaaacaactttactttttaccttttcaaatatccatgtggcatcaagccaggccatttaaaatgacatccagttatttaattttaaattcattttgtagaaatcccacctctctggggagtatgtacagcaaaagtaaggccatcacaaaagctgaatgtcccaaagtggtgctttttagcagaaaatgtaatttttttaagatgaaacttgccttcagtgttcttagagagtgggttccatattggtttctgaaggagagtcaagcctggtctccacagtgcactaaatgcagtagggggtcaagcaaatgatgggaaaagcataaatcatcttggaattatagattcctctttgctgtttgactttaaattcaccatctgctggctgaatcttgatgggagttgaacataaacataaggccagtgcatgactgtgacgtggaaggtggaagaaagttccttctgacttgttaaaacccttaaaatctacacattattattattataatttagacaatgtctcactctgtcacccagactggagtgcaggggcacgacctcagatcactgcagcctcaacctctccagctcaagcgatcctcccacctcagtttcaagtagctggcactatgggcatgcatcaccatgcctggctaattgtttctatttttttgtagaggtgggttttccctatgttgcccaggctggtcttgacttcgtgggctcaagagatcctcccacttcagcctcccaaagtgctgggattacaggtgtgagccactgcgcccagctgacatctacagattatcatctattattcttgtatttgttaaccatgatctcaaaatgatttaattataaaactcaaaccttaaaggacaattggattccaaaatgtagattatatgtagataatatttctgttcacaagtctaggtgtacattagtatccattcagaaaagtgaaaaaaagtttaaaagcatttttaaaaacatgatgaaactataacactcaaaataatgtgatgggggataaaaggcagttgattgataaatgagtcattgacaggtcaatgctgtaaaaggccgagtctaagttgatggctctcagtcctggttcgtcactgctgttgtggaacttggcaacgagtccctcttgggaattataggcttagcatcatgctcttgctcgtattagctgcttcttctatcactctttcaacagtaacatattaaaaacaaaaacaggaaaaaaaaccctcaaaacttctcaggtaagtagtattaaggacacaaaaatatttcaggcttgatttagaactacatttatgaaagtaaactacgtgatatagagcaaaaccacaacctttaggttttggggggttttggtcttatttctctttttaaaaataagagatagggggtctcattctgtcatccaggttggaatgcaatagcttgatcacagctcattgcagcctggaacccctgaccacaaagggatcctcccacctcagtctcctgaagctagaactacaggcatgtgcctccacacctagctaattaaaaaaaaaaaaaaaaaaaaaaaaaaaaaaaaaagtgtgtagggaaggggtcttgctgtgttgctaatgttgaactcctggccctaagtgatcctcctgccttacctgggattacaggcatgcaccttgtgtctcactaatagatttgctttctaggtctttcctgtcaggtccaccaatattttagatggatggagcacttgcattagatcaggagtcaaaattctattcctgaatctattacttaccagttgtactactttgaatgaatggcttaattttttagtgactttgaattgttccagatataaaatgacaggataggtctagagagttgccttagatgaattaggaaacagtttctgagatagagatgttagtgcagtaggtttattggggagtgttctcaggaatgcctgtggggaagtgaaggatgtggaggaggaagatggactggaattcatttgccagagtcctcagcagatcctaccagctctagagctgggatggcccttcagagttatcctgatccacaaggggtcagcccctaggcattcataagtcactttgtccagtcattggggttgaccccaggaaaaggtatggtttggggtaagaggactcttcagttgagggtagttcctaggaagctagtgagctatgagttggcatcaggcaacatttccagcaatttggtcaatgagttccccttaaggctggatctgggccacggaccatggcactcactgccatattcacagcgtcgttttcagtgtgaaattctactgtgttaaagtattgtacagtcactgaaatgagagtatttttatatttggctacccatgacatttattctcttctgattatattgtttctctcctgatctagagttttagattgttttgtttgttttgttttgttttcctgtacttttctgtctgttgaggaaaaagagttttattcttctagtatgagagtttctattagtcctcctttttagacagatgaacaccctgtgacaattccttttgcctttttgtggcgtgtaaaaaaaaagaaatccataaatagagtcgttacgcaagtcttcatgagttaatttctctctccagttttcttactactttttccagttttcattttcttcaacagaaagcttcttcttctggctggacacagcggctcacgcctgtaatcccagcactttggaaggctgagggggatgtaatcccagcactttggaaggctgaactcctgagttcaggagttccagaccagcctgggcaacatggcgaaactcccaactctacaaaaaatacaaaaaaaaaaaaaaaaaaatagctgggtgtggtgatatgcccctgttgtcctagctaaaggggaggctaagctgggaggattgctagaggctgggatgttgaggctgcagtgagttgtgatcataccactgcactccagcctgggtgacagagggagatcttgtctcttaaaaaaacaaaagtttcttcaaattgcccctttacaatttaatatgcatgaacacatttctttacaaagagaaggttatcttttatctatattcaaaatcatatgccctggggatctttacatcacaatgcaaataaatgttgagttaaccaaaggaagtgtgagtaacaagttagtgactgggttagggggtggttaggacagtggcgtgtgattaagagatgaacatctcagaccgatgcttagtaaaacctacagggggaagcatgatgacctagccttgaatatctcatttaggaagttacacacgtgtctgggcttttcaaaatgtttgcatgccattaatcagcatcttacatcagcttgctcaatgaatgatgactatgtcaaatggaagtaaaacatataaggccagagaaggatgaagggaagttttttttaatgcagtaaaggataaagaaggatggaagtggccaggagtggtggctcatacatgtaaccccaacactttgggaggctgaagtgggaagatcacttgaacccaggagtttgagaccagcctgggcagcatagcaagaccccatctctgttttttaaaaataaaaaaatataaaaaaaagaaggttgtaagttattcaaacccataaggagttcagccaatgtattgaggtttcacactttagatatgatcaatttgctgtctttggccttaaaggaaaaacacaaacacagcagcctcgtgttcttctcagacattggtttctcctcctttcttcctaagacagctcttttcccactttctctctggccaagtccatgctcagcattgcgtgacttcactgttagtctaggtttattctgctctgggaagtttccctgacccccttcttgacagctgcagatcctgtcagtcacttctctgtgtgcttcccttgccttccttgtagatttttattacatcaattaggatacaccattacaatgcattattttgtataataaacacctgtatagtttctaccatatgccgggcactaatctaagtgatttacaaatgattattcttctgaccctcatcacaattctatgagagcagtctattattttcaccaatttatagaaaaggaaactgaagcatagagaattgaatacattttctttgatgtcatagcaagtaagaaaaaaggctaggattctaatccagggagtctggctccacaacaggtgcaattaaccaccagaccgtgaggcctctctgtcatatgcaagctcgtctgttttgctcagaagactgtgttttactcactcactcccaacttcttatggtaaaaattgctttttaatgatttaaataatacatgcccatgtaaaagttaaatcaatgactaaagcattctgaagaaaggaaaggttacctggaatcccatgaccctgaaataaccatcattaaaattttgttctttatccttccatgcattgtttaatgtaccacctacccacacccatacacagtaattaaatgggacaatataaccatttttttaaagaaggatggacatcatctgctctcatcctaccagagttgtctatcccaaaaagacaggttaaaaatctatgtgttttttctataccttttattctctcataggcttgtatctctcatttacgttaatggaactcattggtgtttcaaaaacatgatcatcttaaatgtactcttttagatgttgctttgctcactcagcagtcaccccatgtcacctggcaaagccctaatttatttttttcactggccacgtgacattcattccacagtgtagatgtatcacaatgcattcaggtattctcctatggtattaacttggcttctagaatgcaggggctgtctttaaccctggtgtttgtgacattgtgatgggcataatgggatcccttgaataaatatttgtaaaacatggatggaagtcagattttagaaagaataaattagttttttcttaattatgcatggatatggtcttgaatcggttctcaataaatcaaatttcagtaagggactcacttaaatgtatgagaagagacccctgtaatcaatgtttttaaagttaaatgattgtcttttacattttaactggtgtaaaataactaattattgttccaaatagaatttttgcttaaagatacgtacaatggaacgttataaaaccacctatatttacagataccttgtgctttgtgatctggcttgtatttttcctgttcctttcctgttaccctgtgtacgaaatgtatgttcttcccataaaaaaactaaactacttccagttgtgtaaacacaacagattctttcagaccactatgccttggtgtatgtcaaccctcagctaggaataacatttccatctctgtgattccattggcaatttctgctcaccttttcctaggttgaagtgccacttcttctgcaaaacttttcttgaatctcctttcctgttaccctcctgcacaattaaaaacttgcatccatttgatcccatagaatttatgctgtacttacatgacaggtacttacatcttttattttaactcatttatatcacttacaagactgtttttttctttaggacttggaatatgaccttttcatctttttcactgcagtctttttagtgtccagcatggagaaagtgctcaaaaatatttgttgagtgaatgacagtagagaaaataaaaatgtcctggattggaatcatgaaaactgtctacttatctctaatattaaaaagctcagtgtaatcttagaaaaaataatctgagagctctgacactttccagaggccacttccacgggaaaggaggagcaaagtctctgatcagaagttgrgtaaatatcctctgaggtccctgattatccagacattgacaaaagaaaggctctccaaggtttgccattattactataaggaagtcccagctcagatgattcatagttaaatatttgcatctcctctggctaagaaaaataaaagccacgacattccagagcctttaggcatgtaagatcttggtactttcccagttattgctccttagaaaccggtaactgaaaaggccctgtttcagaaaagcaagatatgtcaaatgggaaggaagtagaatagctatctggttggaattcagaaagtatatcaaggccaacaatataattgttgaaattggttattaatgttttgatactgtgacatatctgttttctgttctctaccacaaacaagaaagatgttgaaatatggcaaatgttatgaataacaaagaggaaaatacaaataagttcttttggcaaatctccgtagcaggttgaactcagactcctttaatgtcaataaacaaggctcagagtcaatgccactttctttggtggtcactttaagtgtatttctcttacaacagccctgcacgtccagtgttattattactgcttcacagataagaaagtggaggctcagaaaaataatgatccataattgatatagtggtatatatataatttatatattataccataggatttaaactgaagtggtaaagcaggtggtaatttgcagagaatgattttggaaatgctccgtagatacctctggctctaggcatataaaactattttcttattaactgaaaatttacaattacaacttgattcttgtggtttaagacaatggaggctttctacatggtgcatgcaaattttcccaaaatctttcccaaattcatttataattcagtgtgggtgagcttaccagttcctttccagaaaacaattgtgattaaggagttcacacagacaattattctgttattctcctctgtcctcaggtaggcagtgctcctcgagctttgggtggcaatccttcaccaatccattgtcagtgtgggtccagcttttcctccttaggccacaaagatagagttgctcatattttatttccaaaatatagtgttaggggcctgaaggccacaaagaagactattctgaaagctcccacactgacatcctccccagtactggaaaacaagtaataaaagagtaggaaaaaagacctcagggccttgcacataataggccttccataagtttatttcataaatgagattctgcttgacggactggcagatggagcctgagtttatagtcctgtctgttattaccttgctttgggccctgtcataacacttcctctcaaacacgtttgaaagaaatgcagcccaacataggccgtctcctcgctgtgctgagagggtcttgggtctcacaaagcaacacacacagccaggtcatgtctctgagcatcggatctagaaaactacaaagccaggaagacatggacaatgctaacatcctccctttgtccaccacatacatgcatgaaaacacacctaccctcactctccacccacccacacacacacacactggaaattgtatcatacacacaccggaaattgtacccaaaggacgctattactaactatgaagcaagtggcacccatggcttgtccagagaagacacccacagggtcagacttcacacaacaagcctatgaatgggatagcccacatttaggagtggwcttctaatccagaatcttctctttatttagttcaagataacataaacttcctttttgtaaatttgtccatcatccactcccttgctcttatactctagtgagggggaggtcagatgataaatgacaaggaagatcatttccagccgtgatgagtgagatgcggaaaacagggcagccatggagcagcgagagaacaaccaggtgtggtcaggggattccctagtgaggtcgtttccaaaaccctcatgggtagacctgaggctgtgaggaaaagaggaatccaggcagagagaatcaaaaatgaaaagtcctcatggcaggaatgagcctatttcaaaaaaaattaaaaaacaaaaaaatctgggtggcttaatgaaaaagaacaaagagacccaagaggctagtcagtttcgactggtgcttagaggccatggtagagtggacatttttttgtttgtttgtttttgagacaaagtcttgctctgtcacccaggctgaagtgcagtggcacaatctgggctcactgcaacctccgcctcccaggttccagcgattctcctgctgcagcctcctgagtagttgcaattacaagtgcccgcagctaaacccagctagtttttgtattttcagtagagatggggtttcaccatgttggccaggctggtctcaaactcctgtgctcaggtgatccacccgcctcagcctcccaaagtgctgggattacaggcatgagccactgtgcccggcctagagtggacattttattctacatacaatgggaagccatttgagggatttcagcaaggagattacatgatctcaatggacttcttatttttctttaattttatactttaaaaatttttgaaacaggggctcaccctgtctcccaggttggagtacagtggtataatcatagcccactataatctcaaactcctgtgctcaaagctatcctcctgtctcagcctcccaagtagctgtgactacaggagtacacaccatgcccagctaatgttttaatttttttgtagagatggggtcttgctatgttgcccaagctggtcttgaactcctgagctcaaacagtcctcctgcctcagcttctcaaagtgctgggattacatacatgaatgcacctggcctgaaagtactttttaaagaatactaaggctattgaatgaccaggtggggtagcagagaggaacactgtgagtctgtggcagtgtctggataagggattatgtaagtaccactaagatggctatgttgaagagtgagggagcatttagtttgtctgttttataagtagaggccatcagacttcagaggaattcagacttaaaattcatgtgcctttgaatggggaccacatacatgtcacatcacactaacactaatgtttcattgattcattctatcccttcccaggaatcaaattctgattaagagaaagaccctaagtggctgaaggaacaaaaagagttattgcaaaaaaaaaaaaaaaaaaaaaaaagctgatgcagttaggaaagggaagcctgagctattaagaaaaacacattgcttcttacatagtagtgctaaaggccaagcctgcatatccctgcaatctataaagtctgttttctctgacagtgtcagagttggaaagatcaataggtgtcactcacaccattcatcatctcagaaatgagaagatttaggaaaggagattgaaatgacttatgtggggtcacagaactagttattgttgagaccaaatttagagtcttgtctcctggatctcagtattatactttaattatttcttttttaacatgtaacccaatttgctcctaatagacttggaatacacagtgcctgaaatgtaaagatgacttactcttggccttaaggcatcaaatctgccacacgaaattttaagataagcataatacatcattggaattactcctgcttcttgtacctctttcacatgagttaccatgaagtgaactctatcttttatggaggagaggatatggaggagcataggagaaaggtaccatgtgaaagaataaataacgtctttgccttggactaagttgcattgcagttatcaccggaagttgacagctttggataataagcatggatcttttttgtctttgttggagcctgttgcccttcacctttatgtaacatctaaattctttattctggttgacatgggttgctttacaattttaacttggcatgtgtcatacgatcataggtataatattctacagttacaaaatatgtttgataagtatgaggcattcatgctcattgtgaaagccttcaaaatgtctgtacgctaggagaatggtgaaaaacaagcagtcaagtgagtctcagtgggttgttttctcagaccacgtggactctcttctcaaatctggtactggttttacgtgactttggagaatcttcattctgaatgagccccaaacttttcagtaaaataaaaaaaggattgatattttatgaaacatttttataccctaaaatgcagaagcatgttagaaatatatagttgctatcagtcttcaattaaatgtttaccacttggcaaaaatgatactttggtaaatccaaacatgcctaggtatccactctgtatactccggagaatgttcctatttaagcttattattgtcttgagcattaagcatctcacatcagttgttacatctggctttaagtctccaatgagccctggggaactcaatcccatcaaaggaatttcgagaggagttcacagctcctatctaccatagaagggagaaacaggataaggaatagatccctgataaagcacatgaacaaattaaatccattgttaatttgagtgactggcatagagaggtggcccctacaaaattstcactttttagagtcacggtggttcacagaagaatagaaatcatcttttcctcttaacattatttccatgtactacagttccctctccctaaagtggtctacttgcatttgtcaacactgaaagcaaaaacaaagttgaatatacacccatggtgcatattgttaataaagaagatggaggcaattcagtggtattctaattgtaatgataaaaacttacctatttcatcagttcctctcctttgcccctaaaccccaaatactcactttgtctcttagatatcttgaagtagagttaataactaacgagaataagcatctccatccatgaaatattttaaatatagtagtgtggacctaaaaagatagtgaaattggataggccatgaatagaacaagtcctcatgtcataggcaaacatccagaaagttgtgtgttttgcatttgtgttttgttgtttacatctgttgcataggaatgatcatagttacaacagctgacatttaatgaggacttttcatatgttagacactgtgctaagagctttatttacatgctttatctaatttaatctgtacaaccaatttattaaatgggcattttccagacaaataaaatgacgtttagtaatttcattttgattgcctgtagtcacagccaataagtattagagggaatattgcaacccagtcaactttctccagagtttatctttctgtattcctcagctggttgttggaggttgattgaaaaaccctttgtaagccttgaaatgctaaatagtctacataggaaaggcttctactattgtttctacttttttttaatggtttgtaatctcagcagggattgtgttatctaaaaatctgcttgatgaggtctgagatactggcttttagaggtcagacaggaatgactgcaagataacttgactttctccttcccctctgctgctaaggggtaaggtgggagtggttctaggacttctgccatagaactagatatgtgatggataggaaatgaaaaaatgtgccactactgcacaatgtcaagagattaattggcatttaatgaaatatctgtgccatattattttatagtgtgcaacatttaaaacaatacacatgtaaaaaataaaaaataaaacaatatgcatgtatgcatacatacacacacacacttttagctctgtcttgagctgtcatctcctggggcaggcttaatgacaggtgcaattctggcctaattcaacctcttgaaattgaaaagggttagcaccactcagtggctgctaaatcctagagggcaaaacagcctcctrtgtctcatcccttcatgactgtctcatgggagctcgatttctgtctctttccacctgctaaccagattcgattttgatgctgtaccattggtagtaaaatatacttctttctggtaaaaggagacctgagaaagtagaaatggcattatttaaaggaatttatacataccatataagttggctggatggaccagccaacaagctcaacactttgtattcattgtttcttttaatactcatttcaagctcctggattcagtatcattatctccatatcacaaagaatgagggactctgaaaaactcaagaactttcaaggtcactcacagaatacatgcctgagctgggattctaactcaaccccttaagcccgatatcctgtactttttctgctatatcaggggtcagcaaatgatagccaatgggccaaatcttacatgctgcctggttttgtgaatgtttcatggaacacagccatgcccatttttttatgcactgcctgttgctgcttttgctttacaacagtcaagatgagtgcttgaaacagaggccacatggcctgcaaagctacaacattgagtggccctgtatgagaaacacttgctgaacccaataacaatacgtgagagatgtattgttattgacaataacgaaacatgagagatgtagctcaaatcatttaactcagtgtgtctacatctttttcctgtatcttcaaaatccaacaggataggtctatagatatactgtcttaagcccagcttcttgtatacatttattttgttccaagataacgtgcagaaacccgaattccagataggtctcttataatgagtcatgtttaagagggttctattattccactttgcatttctagaacatacttctttcagaataattactttctaaacctgttcacttagcaggcagatggaaatccaacatcctttggcagagaagagagaggaattttccactcgggcaaagtgaagcactggtcagctcgtggctgaaattttttatgtcatcccctggttctacagaagactgtaaggacagaggaatgaggcatttcgccttgggatcttcagactcagatttctgagtcaggtttgaggttcctgctgtcctgtgggcagtgaggcccagggattacaccaaaggagcaggaacccaatgtcacaggtcccctaactcctgcctagttgcccaggycacataggmacaggcaggggagctggctgatctcatttgtttgttttccgtgtccgttctcaggcagtgataggcatgctatcatctcaattcttaaataaaaccaagttgtatcgttgaagagcagataaagcaaagacagaagcattttaaaaggaattttgtggcttccaaagtacaagtatagagtatttctgagttaatgaagaaataattacaaaatatttttgaaaaagtgacattttattcatagtaattcatgtaattccaactgaagtaattgatactttgtaatagtaaggacctattcgagtgaatgtttaagatactaattatatatcaattttaaattatttaatatcaaaaaggcttgaaagcagcatattttgtgtcattatgtgaattcttgctttgccatttttaaaactatttgttttctcataccccctcctctttattttttatgatgtcaaagactgtgtcagtcaagtctgtctctatgtcatttgagtttatgtttatgtgttagtgcatttttacaagttaactatccagaaacatgcacactctgggcagaataaaaaatgtctaagttaagtgaaaaccactttaaagcatggcagccaaaatagctgtagaaaagtttatgctctattatgtacaattttaatagacatgatatcttgtttcccagaatacaacagattgactatcagtcattttgtaaaaaatgaaagcaaaactaacaatcacaagagctaagatttgctggccctttgcactgtcccaggcactagtctaagtcttttgcaagtgtttcatttttacagcaacacaatacatttcctactgttgttatccatcttaaggaggaaactttgtacagaaggtttaagtagctaatcaagttttcacagctgataagggatagagccagagtccaaaagcagtctagattcttaatgccaatgctgtattgtctctccagaaaagaccactctcacctttccccttgttcttgataatacagttaaattattcatattcatagcataaattttctgtatcatatttaagaatacagttaaatattggtgcatattagaaagatttcacttaaatatgactacatgaaagtagatttgtcttttctaaaaaataaacaagcatttgttttctaaaaaatttactggcgtgcaccatttcatttcctaataattcagaataaatgaggtgtcaccgtggtccacttcaacagtagatgggcttatattcaggcaggaagcatgtcacctatacaacacagatgtgggtgattaatgaaaactaaatcatggggatgagatctttaagaagaagaaaaccaagttgtcttccagaagtgttttcagaaccccctgttttgaggttgtggatagacatgacggttttacaatgccaaaacagtctgttctaaagagaaaaagttcaatcaaccatttcacctgcattatgccgaagagctagtctttacagtcatggggctttaaaactattttgatagcctgtttgggctgcctctaaatatatcctccaaataaaaacctcagaaaatgtatcagagaaatgtacataattaatatttggcttaatatattgtcaactttgattttacatgtcccatccaacttgttaagccttctttgtggccattagtgtttactagagaataatatcatatttaattttctaattatgtgcgaaccttggagtcaggattagttgatatttttacaccttcaaatttataaacctagtatgaagtcccatctagactaacaaatgttttataatagaaatttaaatagtactccagttttgtttatgcatttgctgatggtctttcttgctatgaactttagaaactttaaatgtccrtttactcacaatacacacacagcctcaatgacctaataagcagatttgcagagccataaccttgctggcttatgtcagctcgaagtaaarggggaggtggtagtggtgaatctgtttttattactcagtgtttaatcataatgaatcagaggcttttatgagaaaccttctacatcccatgaaagatttgctgatcaaagatgtagagatttctgttttattagaaaaaattgtttagcacctcattgtggatacagaagacattgtttgttgaaaagtttaagtctttttacgctacattggatgtcacactgttctgagtttagtggtatcaggtcatcagattctgtaagatgtgattctaaaaattcagtcctagtcctaccgagtccattagagaaggtctgcagtatataaaactgtgacttaaaaaatgctcaatcttccatgcacataactgcctgatgactctcaagctcaggtgtgaccttcatagacaggctgttgtaaagtctagtaattccttcaacacaaggtaacttagtatttaaaccttgaccacacatcacttcagaattactaaaggaacttaaatatatgtcagagctcctcttcggaatataggacaatggagcttatgcagatagcattactttaattttaattgtacccatctgggttcttcgaaatggcaagtatttcgtttatgtgcctttctcatcttgggtcaactcagttccatgcactttaaaattattttaggaaagagccacatcttttttttttccttctttctctttctttctttctttctttctttctttctttctttctttctttctttctttctttctttttctttctttctttctctttcttttttgtgcatgcatgcgtgcatgcatgtgtgtgtgtgtgtgtgtgtgtgtgtgtgtgtgtgtgtgtgtctcactctgctcgcccaggctggagtgcactggtacaatcttggctcactgcagccccgacttcacaagctcaggtgatcttcccacctcaccttagcctcccaagtagctggaattacaggcacatgtcactacactcagctattttttttttttttttttttttttgtatttttagtagagatgggattttgccacattgcccaggctggtcttgaactcctgggctgaagtgatcctcctgcttcaaaagtgctaggattacaggtgtgagccaccatatttggccaagaaccacatcccagtgctgtagaaaactccaaaaatttattttgcaattcaaaatataaaagtttgttagtagacatttagtttgttagatatttaaatctactagacaatctattatgtattctgctcagaaatggttaagacctactgatctagaagacggatctctctgagccataatttctgctcaaggcttgctaggggagatccttctaacttggctttatacacaagaagctagctcacaaaaatgtcggtattctagtagctatgcstttcattgaccagacctgagatttggcctctccatcacttcctctgcaggtgatgtagacatcatttctgctgacatctatgttgatgcagttctagagtcatctgtgtccctattatcctgaaaatgaaaattgatagcaaaggcagataatgtccatttagttctgggtgtaaatgtcttccttgctcttccattgtgcaagcactttatgatttgagggagtaatcaggttatattccttctgttggccagaagtgcctgttgaagaaagacttggctctgttggtctggaagctaactatgtagactgatccacagaggactccatattcatcttcttgatactgagggcttcatctgtgagttgtaagcctgtaaatcctctgtttcagtggtttcaaagttccaagagcaggaggaaaatccagactgcctctgctgctgtgcagagcaattagacagtttgagtgcctcaactgttcctatacaggccagtggagtcagagccttaaaaagaccctcttctcccagtgctttctcaagtaagtacagcaacctcaatgtcttatagtatcactacagcacaatacatgagtagttttacatttgaagtaggattaaattaaaagtaatacattcacatggtaaactcaaaagtatatggccaggtgcagtggctcatacctgtaatcccagcacttagcgagactgaggcgggtggatcatttgaggtcaggagttcgagaccagcctgactaacatagtgacaaaccctgtctctactaaaaaccctgcagagacggccaaccccatctctactaaaactacaaaaattagctgggcatggtggcacgtgcctgtaatcccaggtagttgagaggctgaggcaggagaatcacttcagcctgggaggcagaagttgcagtgagccaagatggcaccactgtactccagtctgggtgacagagtgaaatcctgtctcaaaaataataacaataaatgtatatatagatataaattatatattaattctatattttatatataatatatactataatttatatacttataaattatataatatacaaatatatatttatataaattatatacctataaattatatatataattatatataggtgaatatatacagatgaatagttatatatgtagatgaatagatatatagatggataattatatatagatgaaaatatattcacatgttatatgaatatataagtatatatttatatataaattgtagatacataaattatgtgtaaaattcacatgaaaaactctctccacctcattttaccctttattccttctctttaaatctgttgaccaaaacaaatcactgttaacatttgttatttaggggtccagaaatgttttgtgtataaccataagcatgcatatatatacatatcaacagctacatctagatggtccacttactacagccccagaatggaaatttcttcctcaaagcaaacattagaggcatcttctgggaaaaaaaaaaaaatctatatttatctcattctgttcttcatttaattagcataatccctgttggatattttcctcaccaaataaggaacctgtaattaagtgttatattacatgtgcttatttctcttcctggaagtccattttttaaaaatatttttaattgatatagcatagttggtacatatctttggggtacatgtgatattttgatacatgtatacaacatgtaatggtcaaatcaaggtgactgggatatgcatcacctcaagcatttatcttatctttttttttttttgagatggagtcttgctctgttgcccaggctggagtgcagtggcgtgatctcagctcactgcaagctccaccttccaggttcatgccattctcctgcctcagcctcccaagcagctgggactacaggctcctgccaccacgcctggctacttttttatatttttagtagagatggggtttcaccatgttagcccagatggtctcgatctcctgacctcgtgatccgcccgcctcagccttctaaagtgctgggattacgggcatgagccaccgtgccyggccaagcatttatcttttctttgtgtcagcaacattataattcttttcttctagctaattagaaatatgtaataagttattgttaactataatttccccactataatatcaaatactgtaagttattccttatatctaactctatttttgtacccattaaccaactgttatttacccctgctcytctccttcccagcatctgataaccatgatttcacgctctatggagatccttgctttgatgataaattcattaaggacaagaaccctgcagggtgttcaatatgcttcccaggtgccaaatagtctcaatacatattaacagaaagtcagtgtcaactcacctgcacctcacacagtaaattgatttaggcatctcagattcctaaactctctaggttaacacctcatatagtaatgaaagtataatcagttcacatgattgaaatcctctctagtttaatgtacttgttgcttttccatggactttgaaaacatgaaggtctgtagccgtgttgttgcttttccatggacttggaaaacatgaagttgtgtagccgtgtgtctccagacttttaacagcccagaaatggtttcaatgttctgcattaaataaatcgagaagggttagacaaaacagtgtctgaaagatttcatgctgtgagggtgatgagggtgatgggtgacattaatgaatctgaaatggtcrtgactacaaacttgtttttaaaatgtcactttctctaagagaacaaaaacttgaaactcaatgttcatgaatacaagaaggccttttcaaagaaaggccacgggcactctcactaatacacacttggcatttgggtatatccctaagctgtggactgtgtttacatatattactctttcttctcatcactctttaaccaaattgttgagtgtccaagatgccacatggtcaatggattattaccctgtggattcaaatctgttaccaattactctaggggtttattgagtggtcctgcacacccactttcctttgtttttctaattatcgctgcacagctaatcctagctcaaaaaatcaattcctctctcatatctacttacatatcctctttaagccccttctgtgtttttttgttttgttttgttttgtttttgttttatctcacttccatctatttcctggttatttcaggaaaagttcttttcacaccactttttagtggattccatcctgtctctcttcttgtgaccataaaataaaatttgtcataaacaaatgtaagagtctggatgtttctacaaacatttaagtggcaggaagaagctaaagccatatttttcagtcaaaatgttagcagagattttcctgcactgtgcatgatttattttctttctttatatttttagataccttataaattgtctaaaatctcaatgaacaacatttatggtcaaataacataaagaaaaatcctttatagccacttacttactcaattgtatagtgttttgacattctaactacactatcagtatggttttctgttataacgtagtataggtatagattttagccacatagtaggtgaaataggctatgtgttaatctagactaagacacagccattatctataacatatattttatgagaatttgcattccaaggtaaaaacaactgtttgaaaagttaccttttaaacaaatccagttcatatggtgcattactttcattttctgaaggtgattcatatggaagtattgagaagagaaacatcatagtttaaaaaaggccaatcagactttgaggacaagatccaaacattatgcaactttatatcttagcagagtgcatttagtaggtgttcaataactctttgttggataaatgactttatgagtaaatgaagaaaacctcagagctattggcttcctgtgccttgaattacacttttgagtgggactgccttctgcaagccagttgaaaaatagctattggctcacagagttcacctttattttgaggactctgtcaagacaccttagtgcatgttcctagttatgtgaaagatatgctgccaatcagaatcccaatggtctccttgtatgtttcatctttaaatggggctgcgctgttagggacaggatatatcttggcagactacatggatatgaaaatttcaaatcttcccatagtcctctatctttaaggaaaatcatggcacttgtttttgaatttttttaatccatcttccagattccaaaactaggaattccaaatgttgtttggacagactgaaaagagaacaaccaataggagaagtggtacactatgagtagtcaaggtaccatacacatgggaagtgtgaaggagacttacttagtatttwcttatgtctctttgccaatatttgggagtttcacagagcatttctagataatgagggatggaagtgaagagtaggacaaggtattcaaagatctaagaagaatgagaaatcctcgatttcccatatgacaggatgacttggttacacgagtaaaytgctttttgtatgtgaaacaggcagcaattggaggtagcaaaggaatacacaggtaagccctggagtccaattcccaaaattagtggtgttttctgattccctaactgactctatggtaggctcctggtcaaaagatccatcagggctgctgggcccatgctgacattccatatagccatcttctttctgattctctgtcttccagtgatgatccagctctttgcagcagcaggattgtggctggccagaagcacacttgatttcaaaatggatgtgacgggcaggtcacctccttttctgcagaagtgtacttgcatcaacaaatctttttcctctcaggttttgaggaaatgggatcaaacattccaacacagagaaataggaggcgtgggcagcagctctcctggatctctctctttccttgaggagatcaacttgtaaaagattacaaaatgtaccctaagtggtcctagagcaccctcctatcttctttcccaagcttgtcatgtggttgcagtggacatggaaagtaaacactgctataaacagagaataataaattgtaagaaagcaccagaatatccttcttgcttgaactttgaatcattagatccaaacattccccctctctcttctcaaagttccaaagtgttaaagagttttgttctccggtatcaggagttggccacaaatgctttctctataagttcataattcctgttgggaaacttggaaaagagctctccccttctcatccaaagaagtgatgacttctctttgttagtttacaactaacaaagtcccatttctggtttgaaagtcagatggaccttggcttatatttatttaacraagacgtggaatttctctaacagactgaaagtttattagaataacatctagcattaggcctggcaaataggaggtcctcgttaagagatctgatcagatttgacttctaatcccagatataaggtgtttattctttttgagccactatttcctcatctataaaataagaaatattcataactattccataatatgtattcttatatcctgtataataaaataactaatataggaatataataaataactaggaattataaataatataagattgtaataaatatccaaaatcaagggcctccttgaatttgttatatattgatttgttgattttttgagggcagtaatcaccacgtctgtccagatcagcgcggtgtccacgccccactcagcactgtgccttgtccatagcagatgctcagtcaatatttatctaatcagtgctgtttgtattcaaagagaatgtttaacttcttactctttccattcccacctcccctttttgatctcatgtccactatcggtgtactgaggtctcctgggctctgtttgcaggaatctaaaagtagtttttttactttggtactgggacatgtaactccactttttagagaaaatatttcatgctaattaaaacatctcagggctggtctccctgcacttctcactttcacacctacatactcataccccttttctctttttccttactttgtaatgctattagagttgacagaatacttgctgcttccccagaaagtcttagccaggagttcatgaaaccctgtcaggccttgtgaaatgtacagatgtgtttcaaatgatccataaaccctgatattgtataaaatgtgtgtgccattttatggaaagaggatgatatgttttcttaaccaaaatctttcggggtacttcggtccataaaaggctaagatccactccactaatgagcaagatctagtcatttagaaaatcctgcactctctcctttgttactgcctcaatttccttaaaaagctcttataagataataaagaagccctctttacttcctacagttccactccacagcaataccagcttaagtgtgtgccttccagcgtccatcccatctctccgtctgaggggtccccactcctagtccacccaggccaggaaacccataactcatatgtaccagaaaacctcctttttaaatttcctcatgcttcctggcaccctgacctgacaatggactagtacctcatatccacttctaccatgacttctgagaaagtggtattttttaccacagtgaacttggtatatgcagtgtgtgtcaggggcactggccttactaaagtagaggcccattctggagaatagtaagaaataaggagcaatacattgatgaaatagaagggacattaagtgatggtcacagaccactcttaggactgccattaacttcagatgttaaagaagtgcttcagctctctgtgctttgtcttcttcttgacaagtgaggatgttaggattatctgccatgtcatccagcttcaatctctataattgtataaatctggttggcagtggactcgttagtgcaaagtcctaaagccttaaagatccgaagttttctcactgggcaagcaatttgcgggattacgacagtgaacttggtgtatgcagtgtgtgtcagggacactggccttactgaagtagaggcccattttggagaatagtaagtagtaaagagaaatacactgatgagacagaagggacattaactgatggtcacagaccactcttaggactgccattaacttcagatgttaaagaagtgcttcagctctttgcactttgtcttcttcttgaccagtgagaatgttagacgggattatctaccatgtcttccagcttcaatctctataattgtataaatctggttggcaatggactctttagtgcaaagtcctaaagccttcaagacccaaacttttctcactgggcaagcaatttgcgggaaattaaacaagtccaaaatattgaacaaatgaagaaaggggccattttaacagacaggaatacttcataytgtaaagatggccaggtgtagtggttcacacctgtactcccagcactttgggaagttgaggcaggaggattgcttgaggctaggagtttgagaccagcctgagcaatacagggagacctcatctttgctagaactttaacaattagctgggcatggtggcatgcacctgtagtcccagytatgccagaagagaagggaggattgcttgagcacaggagtttgcaactgcagtgagctatgatcttgcaactgtgctccatcttgggtgacagaatgggaccttgtctcaattttttaaaatatatatatacatatatatatatatakagagagagagagactatatatatgtgtgtgtgtatatatatatatabagagagagagagacagagagagagtaaagatctcatttcctccacaaatgttaaaaacattattctgattttaaaaaaagaatgaatttttaaaatttacaaatttctgaaatggacaaaaatatcctaggccttcttcctcaaaaaataataaataagaataataagaaattgcactggtatctgaaaaagcaacttaaagctataaaaattaaaatagcatgttatgccatgaaagagacaaatgagatagattcaagtttcaaaataacaattgttattattatgatacaattatattaattttgtacctataatttaaataaaataataataaataagaaaaatcactgaataaaggtaataatttaaataatttaaaatcttaaaataatgattatatgtataataaaactgtaaatttacaattatagagctataaacaattttatagttgtaatattttgtaactaatgaaacattatattttaatgattttattattgttgtaattaatataaagaagataaagaaaaatgggcaaggtttgaataagcacactttgtygaagatatatggatagccaaaaagcatataaaatatgaccaaaagcctctggtgtttagagaaatgcaaattaaagctaaaatgagattcttctaaatacctatcagaatgtctgagattaaaatgactgactgtagcaactagtggcaggaatgtggaggaactgaagttctcatacactgctggcagaaatgtacgatgacacaacccttttgaaaaacattttggcagcttcttaacaatttaaatgtacatatcccatgtaagccagccagtccactcctgggtatttactcaagagaaatgaaagcctatgtccayacaaagacttgtatgtaaatatttataacagctttatctgtaacagctaaaagttggaaaccacccaaatgtctatcagcaggtgagcggataaacaaattgcggcatatacagtgtagatagtggaatactactcagtaataaaaaggaatgaacaattgacacatgctacaacatggatgatgcaaaataattacactaagtgatagatgctagacgaaaaagagtacatactggctaggtgtagtggctcatgcctgtaatcccagtactttgggaggctgaggtgggcagatcacctgaggtcaggagttcgagaccccccaggcccacatggcaaaaccccgtctctactaaaaatacaaaaattagccaggcgtggtgatgagtgcctgtaatcccagctactagggaggctgaggcaggagaatcgctagaacccgggaggcagaggttgcagtgagccgagatcgtgccactgcactccagtctgggagacagagtgagactccatctcaaaaaacaacaacaacaaaaaaagtgtacatactgcatgatacaaaattctaagaaaagaaaactaatctatataaaaatttttctctgttattctctactgagaggggatgaggaggattaccaaggggcaaggaggaccttttggaggtgatagatgtgtttattactgggattgtgttgatggcttaccaggtatctatgtaagtcacaactcatcatatggtatactgtaaatatgtgcaggctgggcgtggtggctcatgcctgtaataccagyactctggaaggccgaggtgggagaattaaggccaggagtttgagacatagcaagatcytgtctctagtaaataaataaataaataaataaataaataaataaataaatgcacttttttgtatattgagttatatctcaatgaagctgcttttttttaaaaaaaaaaaaaacatataacataaaagagattaacagaagagattcaaaagtctagaacaccaaatattaaaggtagcttttcaaatcagtgagaaaataatgatattacagaaaatggcaaatcatctagaattaaatttctacttcatactatcagcaatataaattgcagactaatctaaattaacaatttaaaagataaaagaaactatagaaaaatacacaattatgtatctgttcttgaatggaaaaagattttccaagcgtaaatacaaagaaaaatttatatagtaaaacaatgattgatttaatttgataatttttttagaaagtttacatcaaaacaaattacaaaattgaaaggcaaatagcagtctggttgtggtggctcacttgtgtaatcctagcactttgggtggccgagatgggcagattgcctgagctcaggagttcaaaaccagcctgggcaacgtgatgaaaccccatctctactaaaatacaaaaaattagccgggcgtggtggtgtgcacctgtagtcccaactactcgggaggctgaggtgggagactcccttgaacctgggaggtggaggttgcaccgatctgagattgcatcagtgcactccagcctgggtgacagagcaagactcccgtctcaaaaaaacaaaatggcaaatagcaaaggggataatatttgccacaaatataaaagaaaaggatatatccttgctatataaaaaggtcctatgaaacagggacttagttggatatttctatttttaaaaaggcaaatcatataaacaagtgttttacccacccatcccccctcaaataaagaaaaaagacagggatggagaaagaagggggaaaaaaaaaactgagtaaaaaaattctttgcaaaagagtaaaaaagagatttgtttcctcaccttgatgttgtctttataagttgttttattttaatcttttgtttttccatattttcagagttcctacaatggacttgtagtacggtacctgggtgatcacaaacataatctagggagtagaaaagaagttcaatgactcagcatagtgttaatggtcttccagatgaaggaggggacatgaacatgtgtctgtcccaataaaggttgagacaaggtttgttgtgcacgtgcgcgtgtgtgtgtgcgtgtgtataacagtgaggagactgtaattagcaggaaaaattggggttttgaaagtagaccacagtcttgtcattgtaccatgactcmccaggaggacagaggacaagtaccctactcctgtgtaaatccagactgccaagtagagcactgagatttgatgagtacttaagaaatgcttgcttgattaattggtaaaagatattaaaggggaagattttatatcacattcaaacatatgaagagaaatgttaaaaatgtttaaagttccatttccagtctcactttccaattcttggttcaaaatacaaggggtaattagacatcgactgtgtagtcaacattatgatcaggctatataaaatcatgaaacatcatcctaaactttaaagaactttgagtttagctgggaaaatatgctcacaggaaataattatgtaggaaaagaaggcatcaaaagggcttaaagcaaccaatcacacagagtttccttgttgggaccccccccccacccgccgggccccaccccgttgatatcctaaatgttctcttgacatcttggatttaccatagagcctagtactgtctgtaaggtcctgggcctgttctaattagtgctgagtatctgttgatctgctacgtgcaaatgggaagataaaactaaatgttagattagggtcaatctttaaaactctttcctagattgtgatggtattcagtggtggttgaccatcatggaattgggagatatttgtgaatgtggctgcaggctgcatgtcctttgtgtctctgactcaagacacacccattgatctcatttgtcttcatttcatcattgggcagaatgcgttctaaaatgaagagactaaaaccttcacagaagcacactctttcaacatctaaggaaaaattgttgatgagaaaactgtgagaacattaggaggtctttaaattgcaaggggaaaggtctgttggtgaaaacagctgaaatcctatggattaaatcaacttgtaaataatgtattcttagagtctgcagtgatctcataggcatgtttaaatgctgtttcttatgactacagtttaaagtcatggtatggactttcagtttcatgaggctggcctgggggaaaagagcatgaggttgaggttgatggtgttaactagagcaactgagcccccatacagaccttctgaacttgctcattaacgaagccacaggatggaaattgtatagtgtccttgaccagagcattagttacaagttgtgagaagagaagaaataagtaagaaagaaaataaatgacttataaaaatcctcagaagatatagtccccaactgttagcacaaagaaaggatgtaaaatcatggaggacagcagtggagaagataacgttagcagacaataaaaggccaaagttttagaacagtagtaagtgtttaagaatatacataatatatcttcctccatttgctttttgtcttcaccataaatagacatgagttaacgtatgtttaaagatttatttcccttttattgagctcacccaacaaaagtttttttcatcatgtcctgcttttacaaaccaagatctaatttgacatgattacgtaattgtgtggccatttgtgcccttccttctcctcctcctttctctaaagtagaaagcctctctttcctagagcctatgtaaaatgtgttaattcgcttaatagcaataataattttcttatgacaatttatctattcactaaagtgttattaaggacctattagttggaagcctctgtgccagctgttgggaatagaaaaatttataagacactgtctttggagctttcaatctagtgggggattcaaacaattaaagagatacttttaaaagacagtgtaataagtactctggaagatgtggcagactgccagttgccttccccagcataacattttcccaatattcattaggaaaagaaccctttaattgtacccaattaaaataccgaatctcccagcctcttctgcagcagatgtggctgtgtgactaagttctgtccaataagatataagtatacatgtttggtgagatttccaggaaggatgctcaagtggrgatgactaagtcagaagaaagttccttttagctttcctgcattcctagaattctgatgcaaaagctggagctacagcagcaatcctggactatgaggtaaccttgggagtactagggaattgggatgctagtaactttctagaagcaccaactcagccccagaatgcctcctgctgacttcttttacgtgggagagtaagcatttgtgcatttaagccactatagttggatatttgaccattgcagacaaaaataagatcaaccgatagaatgccatttatgaaaaaaaaaaaaaaaaaaaaaaaccatgggagtggttctcctctctgttatgatagggagaggtcagagatgctgtccctgaagaagtgacattcacactgagacttaagggagaaatgagtgagcaaggtataggaaagtatttaaggaatatcatctgaagctctgaattagaagctatctacaagatactaaaagaagatcagcatgacagaagtacaggaattaagaagaacatagtaggtgacaaggctgaaaaatctcatagattctccattttgcagagacttatagatcatcttcaagatagtaatagctgcagagcagaaggctagagcagagaaagaactttgagagataccaatatagacatggtttctaaagtcttaggagacaataagattacccaggaagagtatttaaagtcaggagagggccaaagacagaaccttgagatccaacacttaaagatcaagaagaagagagtttcctatcttctgtttcttaaaaaataaataaataaataaagcatatcagcataattcagagtcacaaattctaagaaatcatggggcagagggcaggggtgaggtagggtttgttttgttttgttttgttttgtttgtagataaccaaaggaagaaacgattgatgcaagatttcagggagggtgaatagccctccttgtagctttgccctgctagagagatggtgggtggacaattactataatatttacaaacaggataagtctacgtcagcccctaacattctcagtttcgttatttgtaaaatggcgtaatgatacttatcttttagagttgtttgaagagtacataagagacggaaaaggatttttaattagataaggaaagcataatcacctatctttgattcattcacccttttaaactgattaaagcttagaaaataatcacatatgcagattgatcttagtttgtccacctcttgacaatcagttagtagtatatatgtatttttttatttttaagaatttttatatccccatgcattgactaatcttgccccatcatagataagactagaacaaaatattgctttgagaagtccttgagttccaaagatttaccatgaagctaatgaaacctgcattgcagagtccttcactagtatggccttttccaatgtcttgaaaggagtcctagtcacatgttcacatgcttacacatttatgtaaaatatgcaggataagataattaaactacaattatctaagatggcagtctttttttcactctgattttctgtccaaaatattcctcttgtggaagtaggtttggaatggccctgaacattttyggaatctgaactgagagaaagttgagtgaaagatacattgatttaaggcatagtgagatgtctagtaaagttattgtaaggtattccagtgttgaaaaggcttccagaaatatgccaaaaccgactgtgctgactcacatgatgtcatgccagaaagatgaagggccagagattgtatgatgacctgagtttgtccttgtgcaacaagcaccaatggcatatgagtgttgatgggacaagttttgaaatgtatggagccaaaagctagcctgtggaaagttctaccaggcattcgacatgtggtaaggtaaccaggagactaagttccgtggatgtctagtcaaatggaaattttcttctctcaagaataaacatgataatttcgtgtatgcaattctaaattcaccaaattgtgttttctttttcaatggcaatttcaggaaattaaatgatcagaatccccatgtttccaggggccaaacctgtaatagtcccacagacagtgagtgtgtctataacaactaatataggcagaaaaattcaaagacgttttctgaaatttgccaatacctgtaaacatttttaggacattgtcaaaataagctgtgaagctgaaagaagtttatttaagtattaataataaaaatttaataagctatgctaaataccaattctctttctattatctctatagaaaagattttacaaaatcattctcagatgtagaagcaatttttaaaaattcagccaaaaaatagtagggtgaaaagtattataatgatagcaggtagttaattaatagcatgttctttttctgaattttatgatgcttgtggctttgacaactttaaacattttataattgtggaatttcttttgtcgttttacagaaatattcagttttgtacctcataatttgtatttataattttgtattcttcttcataaaaagggccattgaattgtgtttaactcatgcctcaccaaacctgaaccagcattttcctctgttgaatttctattgcctgcctacagcaaggcccacgtcttcctgtaacagttgcccccagttcccttaactatcaccagggagtcagcagttaatgacatgctcaaccttcctccaattacagatggttaggagagaaaacaaagccataaggccattaaactcatgaggttttgactggtggttcggaggtagagctggccctggctatatctgccgtgtacacaagaaccaaaaataccacacttcatttcagaagatccagatttgatcccacctctgccactggtgtatgatcttcagaaatgaacttggctgtccgaacttcaatccccttattcatacgatagacctattgtgatggccggcaagctgaggtatagaaacacatattatatagtaaggggttcttcaaatgtaatatctgttctcaattcctcttctctatcattaccaaggagccaatgatgcacagctacccatgtaccttcattgtagagacacaccctgaacaagcagacaacatggcgccacatcagagtattatattagaatgtgtgtttggcatttctttagcagaggggccaagtgtaggaagggagcgggtagaaaaggaggaccacaggtgacaagagtctcccctgaccttaagcttgcagttcccactgaaccaaacagaagccctgtatgcatctggaagtccttgcttagtgggctgtgcaatgtgtgttttaggggtctcaagccttcatcccatgtagccatggacaacatgttccaggaaaacattacttcctcacttcattacattccaagtgacatttctgcatcccttcttgacgaatgttgtccaaaattggttgtccctctctttgatccagctctgaccacagagatcagttttacatacttgggtacttccccttggtgattcaagaggaggcactttccttaaatagccttggaaaccttgagacagctgctgcatccatctatgttcattgctcaaacttcctgtatggtttgccaccaggcttaggttcaaatccaaaatcaaaatcttaacatggccacccaggcgcatgtggcctcagtaatacacagtttttgagcttcatctcaagcttctcttccccttactttgctctccatgcctgcttccagctcttctgcttcacccagtccttccccatccctcatgtcacacaggttagcttctgtgcccaagtagggtcctgcttcctttcacaaagctgactcccatgagctctccagagatgatctcaagtgtcacttttgtggggataactaccccagtgacaccctcctccagatttggttagcttctcccattccagcctagtttagatggaatcatattaagttgctggcattaatttattatgacctacaaaaccatcaatagtgtacagttctcacaactcccttgtacattgcagccctcatcaaaattgttatgaagtaattgatttgaataatgattaatatctgactccctgatggtttataatctttgtggaagtagacaacatatctatcttgtctactgctatttagcacatactaaataccacctagtaaatatttgtttaatgttacttatttaactgcagagatatactttttacattttctacatttaagatgcacacggaatatgcgatgttgtggagaaaagagctatttgccaaatggttacttgttactttatttttctaaggctttgggcataaaatgccattatggaattactattttattacaatggtatctgtagtactttggccctaatgttcttttttggttatgatgctgcactatgcctgtggaatacattctggatgcatgatgagactactgagacaatcacaatcttgtaagtttccttttcttctaagataaatctcaagcagagattctcttctcaggaagagtagaacttttcacaatctcgagccaagtaaacactctcaaattgcaatgcaaaagattttgcaaaatacttgaaaaaatgcaatttataaagcagaagttgtacagatgccatggaagatctaatgaaaaatcagaaaagattgcagcacagatttaactcttctcaagacagcaaaagcaccccacatgtgacagatactcatgagaacattgggagcctgaagccccgttttccagacaaggaaggaattacgggtctctgatcacagcagaggggccctcattagacccatcaaggattgcacgtgccctgtgcaaggccacatgcgcatggggtgtgcaattaactctgcccatgctgctgaagtttcagtccattagtctgagtgaatcttggtcatttgtatccctcttggtgcctcataaacatatgcctcatagtctgcatcttcaaactttttccatactgtaaaactgtcttcgcaaaatctcatcacaagctgaaaagtgatccctggtgataaacaactgagatggttattcacctccatgactagcctttcagggcctcactttctatatccatcaaatgggaagaacaatagatgcctcatcctcctcactatgttgctgtgagcatctgttgaagtagtggctattcragtgcattgaaatgcatcagtcagtacacagatacaagggcttctgataactcatacctgaagaatttttgtcaaccctgaagggatttgcttcttggtatacgggtattaaaatactagtataatttctctaacgggagtatgatgtcactagttccagagtcttttcatagatggatgggttttatgataaataactcaccctcrgtgttaacttggctttccaactagccaaacaggcctttgtggaacaaggttagcaaatagcatttgggcaaacgatcaaaagggtctccctctcttctatcactctctttatctctcttggtacctctctctgactttctctccctcctttaaaaagttatctctgttttttttaattttttttacattaaaaacaacaaatgggcccttcagaatagtcgaaaactttagaatgcaaagatatcaaaaaataagaaataacctagatcagaaaacagataaatgattgccaggggttgggattgggaggagttatttacaaggtgaatgaagaaattatgaggggttgtggracttttctatattttgatcttgaaaattatataactatatacttgtgttaatcttgtagaagtgaacactaaaaagggtgaattttattataaacaattttttaagagaacaaaaaatgtactataatcccaccagccaataacacactattaacactttggcgtacttctgactagtctttttttttttttttttttttttttgctggtgtttcaaaatgtcattatgatcatataatacacaaatatacatatatgtgtgcatatagatatctacagatgactaagatagatgattgatagatgatagatcagtgaatagataaccaaactcaaaacaaaatagttaattcatgcaacttgcacaaaaggtacaagaaatatactatgaaaagtctccctctcccctttttccttgggcacctagctagttttgttttagtttttacctagctctcctgagacagtgtgcatatataagacaaaatatacatatacctcttttgtaatactaagacaccaaattcatacttctgcatcctgccttttttctttacttaacaatacatcttgaagatggttcaaattacacatatatagataatttttcatgactgatttttaatagctgcatagtatttctatattttaatgcactgtaatttatgatattgtattgacaaccacccgggttgtttttaatatttcatttttacaaataataatgtgataaacatccttgtacttgtgagatttcttttcctatatgggttatttatctttagtagagcttcttagaattggaattgtgaagtctaagtccacattttaagttttgctagataaagctacattgccccctttaaagttgtgccaatttttactccaactactgatatatcaaagtgtctgttcttgtatcattatcaaaattttaatatttaattatctgatgagtgaaaaatgacatctgatagtcctgtcagttagtattgcttttaatgtgactaatttttagcttttattcatgtttaaatgaataaaatgtactccctttactacttttttttttttttttttttttttttttgagacagggtctcaccctgttgcccaggctagagtgcagtggcgtgatcatggcccactgctgccttgacctccagggctcaagcaatctgcccacatctgcctcctgcctgtgttgctcagactggtcttgaactcctgagctcawgcagtctacctgccttagcttcgtaaagtgctggaattacaggcgagagccaacttgcccagccctgtatttcctttactttgaactgcatttgtgtatccttggttcatgttctatttgatagccatttcttcttaattagagggatttcttttttttagattagaaaaactagcccttttggctatgataagtggtttatatttccttttgtgtgctacttgccttttgtctttatttggcttttttttggacttgcattatttatttaagatttacgtagytggatttctttctcctttcacatatggcctctctcacttcaatattatgtagaaaaaaacctctgaaataatgaattcctatacttttatgggttctttttttattttgatatttgacccatctggaatttattttggtataagaatgaggtagattttcaacaatttattccactaaatcataaattagtacaccttttttccataaatggctaaatagtaaatattttagacttcatggatgatacagtcttggggcagctactcaactctggccttgggcgaaaaagcagccacagacagcacaaaaaccaatgggcataactgtgatccggtaaagctggtgtagacacacaggcagcaggaggatttgaccctcagattgtagtttgctcacccttggtgcagaagattacttaattattctaacaaaattgatttagtaaataattttccccattgatatgtcttggttcctttataatacacaacattattttttataggtaggtcttgtacaaaactctccatttgattttattgttctgtctttctattcataggctgggtatgacactaatttggttactatagctttatgtatatttttaacattggatgaggtcagttgctcctcaaaactcttatttttcagaattttgtgcaggaatatctgagtatttctaattagattagaatgtcagaatacattcatggacatatgagtttggggttttttaaaattttttttagatatccttcaccttgaacatttattatttctttgtgttgggaacaatccaaatctctcctagatgttttgaaatatacaatgtattgttaactgtagtcaccctactgtgctattgaatactagagcttgttccttctgtctaactgtatgattatactcattaaccaacttctcttcatctgccccccacctccacccatctcagcctctagtaactaccattttactctctacctccatgacattaacttttttagctcccatatatgagtgagaacatgcaatattttgtctttctgtgcctggcttatttcacttaacataatgacatccagttccattcatgttgatgcatataacagatttcattctttttatggctgaatagtaatccattgtatgtatatacacatataacgtctgtatatataatgtgtatataaaatgtatatccataatatatgtatatatacacatatatgtaatatatatwgtgtgtgtgtgtgtgtgtgtgtgtatatatatatatatatatatatatatatatatatatctcacttttttttttgagacagagtcttgctgtgttgcccaggctggagtgcagtggtgcaatctcagctaactgcaacctccacctctcggttcaagggattctcatgcctcagtctcccaaaaagctgggactacagtcatgtgccaccatatccggctaatttttgcattttttagtagagacagggttttgccatgttggtcaggctggtcttgaactcctgacctcaggtgatctgcctgccttggcctcccaaagtgctgggattacaggtgtgagccaccgcatctggcctcacattttctttatccattcatccattgatggacatttaggttgcttccatatcttggctgttgtgaatagtgctgcagtaaacatgggagtacaggtatcattttgatatactgaattcctttcctttgggtaaatatgtcatggtgggtttgctacatgatatgatagttctacttttagttttttgagaaacctccgaactattttctacagtggttgtactaatttacattaccaccagcaatgtataagagttcctttttcctttttccacatcctcactgacatttattactttctgtctttttgataatatccatccttactgagggaaagagggtatctcactgtggtttcaatttgcatttccctgatgattcgtggtgttgaacttttttttttttcagatacctgctagccaattgtatgtattcttttaagacatatctgttcattcctttgccctctttttagtgcttttacatatttggcttttgtttttttgttttcgttttcattttgctgttatgttgttcctggatatacaaggaactcaaactatagtcctttgtcagatgaatagtttgtaaagattttctcccattcctcagattgtctcttcactatgttgattgtttcctttgatgtgctgttagtttttagtttaatatggtcccatttgtctagttttgttttttgttgcttttgaggtcttagccacaagatcttcgcccagaccaacatcctgaagtgttttccctcttttcttctgtagctttatagtttcaggtcctaaatttaagtcttcaatccattttggtttaatttttgtaggtggtgagagattggggtctagcttcattcttctacatatggatgtccagttttctcagcaccatttattgaagagaccatcctttcctcaatgtatgttttcagtgcctttgtcaaaaatcaatcagctgtaaatacatgcatttatttctaggttctctattctgttccattggtctatacgtctgtttaaacaccaataccatgctgttttagttagtatagctttgtagtatattttgaagacaggtactgttatgcctccagttttgttttttgctcagtattactatgagctatttttaaaaaatacttccaaagaaaaaagtgcaaaagtttatattagcttactatagttttaataggttaaaattagtagcttctgagtaatgaagagagactgagcttaatttctcctgctttgaaagtacttctagggtctgggtgtggtggctcatgcctgtaatcccattgttttggaaggtcaagacaggaagattgcttgagccccagagttcaagaccagcctgggcaagatagcaagaccctgtctctaaatttttttttttaattaggcaagaatagtggtgtgtacctgtagtcccagctacttgggaagcttgagcccatgagtttgaggcaggagcacgctatgatcatgccattgcactctaatttaagcaacagagtaagtcctcatctttaaaaacaaacaaacaaaacaaagcaaaacaaaagaaagtacttctatttatttcttcacctgctaatttagcttgttcaagtgtagaagctggaggatgtttccctgcaatgacagagtagccaattttgtatctcctgattttttccttctctcattcttctttgctcaacagacactaaattgaggtttgtgtccttgtaaatagtagatttcatttaccctctgccacctttgtcaaaaaataattttaatttaaaaaatgatgtaaacttattttagcaaaattgaagactatagaaagctatgaaagtgaaaatttaaatcaccgtaacactgcactcagagataaccactgttaggacttttatttctttctttctcttctctatacacctgtaacatgcatgtacacctactgcatgcatatgtgtatgatacatgtgcaaacagtgcatgctaacattttctaccctgcttttccatgtgttatttttatcctgtgttccactattttggaaaccgtcagggttgacagagggaaattgatcaagccctttgtcttcattgatgtcaagagtttcagtcaacttggaggccgtggcctcctccttacaggcttcttcagcctttggtttgagtttgggttttttacttttcatttttggaggagccacgttctctctcctttcctattactggagagccgcttcctctcttcactcattcattgtgcagtgtgggggagtcaggacccagatgggaaagaaagcatcttgccacactcaaatctcatcttttttgccatgtttgccccatggcatttctctcagcatcttcttgtgctttttccaaaacatataaaggacaattctactctggaaagtcactgggatactgttctctgagaacaggtattgagaagaagatggtttcctcttggaacttggccaactggctcacagcgaacgtggtgtggactcttaccagctctctctagtatgctaagggcccccaaccagggaccctgaaggcatctcaagagagcagtgtccaggtctgcccttgttggaaggaggatgatgtgaggagatcacctttattaaagctgcaggttgtctgccagattttcaaatttcaatgtaactttttatttaaccaatgctgattaatagtagtggcattgttgaaatccattccccttcatttcattttctaatgaaatttcggatttctacacagacatggttttctggcataaaaagcttgcatttgcaacctgtcatattgggactgtgcagaacttttccatgttttaaaactcaggagaaagaagtaaagatggtaagagtgcacttgagcagaaacaaagggctgtgatcccaaaacaggggacaaatgagctgcaaaggagagacaccaagagcggagagcaagaggcaaagtgatatgaaagactccaaagtgctggttcagagaaaagaaaaaaaagggacataggtcaggaaaggggagaaggactgacatgaactggcaaatggcaacagatataaaaagccagctttctctggggagtggaaatgtttctaagcatttttgttcatgttagtatgatttgttttttcctaagtaagcttgaaaatcatagagtgaataggagaaaccaaagattagggaaaatatttttagaacaagctcagggaagtcatataggtttaaaatatatagtctatgcaaataatggcacacatttcagaatggaaacaaaaataagtggcagataatgtgtccaagtaatattggtagcaaatggactgttacgagagcaaatgatattttgcagagctgagagtgtgacytgtcttcaattatttgaatccctatcctacaaaagcattgaaaaaggaagatctggagccaatgactgtgtattacatatattttcattcagtacaagcagacatcatcagtgtgctatatactactttcattattattattatcttaattaaagctgtctyacgagccaggcgcagtggctcacgcctctaatcccaacactttgggagaccgaagcaggtggatcacttgaggtcaggagtttgagaccagcctggccaacatggtgaaaccctgtcgctactgaaaatacaaaaattagccaggcatggtggcaggtgcctgtaatcccagctacttgggaggctgagacaggagaattgcttgagactgggaagtggatgttgcagtgagccaagatctcactgctgcactccagccaggatgacagagtgagactctgtctcaaaaaaaaaaaaaaaaaaaaaaaaargmcaacawcaacgacaaaactgtctcatgatgaaatgggatgctttcactagccgtggttgctcatgcctgcaatcctagcactttaggaggctgaggcaggtgaatcacctgaggttaggagttcaaggccagcctggccaacatggtgaaaccctgtctctactgaaaatacaaaatttagccgggtgtgctggtgcatgcctgtaatcccagctactcaggaggctgagacaggagaattgcttgaacccgggaggcagaatttgcagcgagccgagatygtgccactgcactccagcctggacaacagagcagaacactgtctcaaaacaaaacagaacaaaaaaagaaaagggatgctttgtggaacagggagattacttgcactggaattgttcaagccaagttctatcaacatttgacacagaaacacaygaccatcgtaaggtctttcccagctcagcattctgtgactgcgtggtctttgtactgagttttacatgatatggatttcttaccttagaaggatcagtttttaaaagatgggctgaatgaatcaaatcagagaacactatttgcctacccaatatctagtctccacagctagctggggacactttatagccacgttaaaaaaacaacagcaaaaccccactgcatttctcaacttctgtagcagatggaggtggtcaagtgactaagttttagccaaagagatattagtgagaattgggagaaactttgagattccttaagaagggagacagaggatgctaacatggaacttgtcctttgccttcccattctcctttctgccatctggatcaggatatctggccatgctgaaatcatgagacaacatgaaggataaaatcctcaaactaagaatagaaatcagaacattaggacctggtctgagttcattgtggagcttccccagcccgctcagkctgcccccagtcttcccatttttagaaaaattaaaactatggtttgttaaagcttctattctgatggtctctgttacttgtagctgaacgcaatgaattgtgagatacgatttaccacaatttttttctttctttctttcttttttcttcttcttcattttttttttttttttwttttttaaagggttgtgccatgtcacccaggctggagtgcaattgtgcgatcatgactgactgtggtgtcaacctcccaggctcaagcaatcctcccacctcagtctcctaagtagctgtgactataggcatgtgccaccatgccaggctaatttttgtattttttgtagagatggggtcttgctgtgttgcacaggctggtctcaaactcctggcctcaaacaaatcctctctcctcagcctcccaaagtgctgggattacgggtgtgacccagtgtgcccagcgctgtttactgaaatttttttttttatgattctgactatagctttaaacccaggctctgccatctccatgctgtttaacaagttctctgcccttcgtctgcctcaccagatgtattatgtataaaaaaaagtcacaacctagattgcagaatttcatgtaaatcgcttacaaaacaacacagatagaaggcagcaattggtgagtttgatctttggtgcccaaatacagctgtgctatttggtgtatacaaatgtcaccaaattcctgcacaaatttgcgggcgggataggggaagaaggaagggatgatgaaggcaatggacacaacagtctaaaaagttttaaaaaattgaatgtaggtaaaatagagctcagaattcctccaccatcatctgcatttgaatctggggagaagtcagccctcccaactttcacttcctactagaatagcaagacacactctgcctccagacagtgtggattatctgccacccgaactgaagtttcaatcactcaaatcctggtgtcatttacattgtttctactgggaaaggtcaggtgtctgcaggggctataagcaaagaaaaacccatcccctggaaccaccagtgtaaaggagagggaaggcgagtgacagcatgtgtcgatgctggatcattttcaggggtaacagaccactacatcctgaggctttttagcaaataggaagctgaaggacaaacatctgaaggagaaattaatctccgtgagtaggtgacaagctgcgataagcccttggggtgtgtgtcagtgtagcacagatgttagtgtgagaactattacttgattcaagggaaaggggagaagggcagggaggggggaaatgacaatgaaaaacaaaacagtgaaaaccacaatcatcttcaccaggcagctgatttttttaaaaaggcatatatccatcaaaggaacaaaacattaaaatacacccatatggcaaagacctggtgtaactggaattttcacctcctgattttgacagtgtaaatttgttcagcccttttgaagagcaatttggcaatgtgatttcagagccatagaaatatgcacatccatctttcaaatgtcccagctcttataaatgtatctttaaaaagactcaaaaataatttttttaatttatatgcctgaggtgtttatttcagcatctctacaacagagaaaaatgaaaaccgaaggtttgacatttgagacaatattaagtaaatcaatacatgctaatttaatgggatggtattaagtaaatctaagaccagcctggccaacatggtgaaaccctatctctactaaaaatacaaaaaattagccaggagtggtggcaggcacctgtaatcccagctactggggaggatgaagcaggagaatcgcttgatcctgggaggttgaggttgcagtgagccaagattgcaccactgcactccagcctgggtgacagagcgagatcctgtctcaaaaaaattaaataaatcaatatatggtaatctaatgggatgctatgcagcactaaaagtatattttaaaaaaaacttgagaaatgcttctaagatgaataatacacaattaagtcaattacmtgacttcaaatattattataactgcatgtggacaagaagacaaaaccttcaaggaaaaaaagttttgatattatgagattatgggtaacattgtattcccagccttgaatttctgttattgttactataatatgtgtacaatttttttttagtgaagtaaaacaaacaagtaaaagaaaggttgaaacttcacaatgtagagatcaaccagcctgaacctctcattttacgggtgacaagttgaatacaaaacttcggtggaattgaacgggcttatttcagtggaaatagtgagaaatactcattttcccaagtgcctattagaggtgctgtcattttccaggagccaatagaaaaacacataaaagcagtgcattggtgtgatctgggctgtttctctgaaatcactcagctcgctttcaactgctgcgttccacaacacaatgtggttctacattaaccacattacatcataaagagatcattaaatgactccttatggaaagggagggaagaaatgatgtttagagaacctggtagtatcggaggcatcatcctccttctctgctgcctatctgtgtcgcactcactcttgaggttatgcaaagaaaatgttgacaatttaggtgccagctgttgtttgacgaatagcaaataaatgactgtgaagtcctttggaaaacagagcaaaaccaaattagtgattcccctcttctgcctcccaacatcttcacctccagggccttctttacactgactatatttcctctgatttcattgtcccaatgagacagtaatcctactgagagaacagatagggttcttggagactagaaattatgtttattgaatggttaaggcattgtttttttatcataagctataatttaaagttactaagaaaacaggccaggtctctgtaatgtagggaagcagagatcagattatcttctgggggatagtggaggagggttgtaaccaccccaagtccttgagtgaggatggaacctagggctcaacagcagaaccctaagaacggatatttttgcctaggcctaagaatgtcatcagcattttatttatttgtttgtttgtttattgagacaaggtctgcctctgtcacccaggctggagtgcagtggcgaagtcttggatcactgcaacctccacttccctggctcaagtgatcctcccacctcagcctcctgagtagctgggactacaggcacacaccaccacacctggatatagttttttttttagagatgaggccttctacattgcccagtttggtctcaaattcctgagatcaagcaatccccccaccttggctcctcaaagtgctgggattacaggtgcgagccaccgtgcccagcctcatcagcatttttagacagctacccctctgtgrtactctgtggtgagaaataagtttaagagataagtatgcagttatgaggaaagrtgatagaaccacaccatttttatgaataatatactaaaatatattcttaaaaaacttgtcagttgtatatttgataatagcatatttttacttagtccttattaaagatctcgggaaattcaaatctgtttcatctttgatcaggagagaagatgttgcccatccttagcccagagttagaaaggagaaatcatgtgattggccaaggtggtgatgagagtctcttcagaagggaagacttccagttgcaaggtcaggtgacccaatcaactgcctttgaacatctggaaaaatcttctaaaactcttccttctcaagaagtcctgcaactggagctactaatgaaagctctttccagtagcccttacagctaattttctgttcacatatttgtcttctgctgtaaagagctgtgcctcatagtgtattaagggctggcttttcctttcattgtaagggactttccaccacaaacacaaggccaycatggccagcaatgcacaaaacagcagagtatggtcggcccttaaagacaaggtttgacttactcctctcttctcttttttacagacatgtttctctactataaacttcactcttagctttattttcaagaataaaatatttctgttttcaaattggcatcttacgattcagcagactaacccaagaaataattttatggaataatcatawttcaatatcttatttcttttcaaaggaacatttaaaagcttataaaactaggtataacaatgaagctgtaaaagaaagtaagaaaacacaatcaaagttaaaatgaaccaagctaaaaggtaaatataattattggtgttaggctccatatttgcctacaggcttcctaatattcagagcaaaatggaaaacaaactgttatcctagctcaggtcacagatcgctctggccattcccttttatctgccctgtgtgctttcttgggctcttcttctgttaacaggactctttttttctttggggaggttcttctccaccctctgcctagggctgtcaatcaatgtgccccatcttctacccttctgcataggacccccattcccttgacatggtgattttccagaggatgggtacctaggtacctggccaataagagttcgagatcaataagagtcttcccagaggttaatacatatgctttggaatggagtttattgcccactaaagatgctaagctggaaaaatataaattgggrctatccattggctaaattccctgccctgaggagcaggcctgtctccagtgggaggaagaaaactgaacagaggagaattgcaaatggagagagagcaagccctgtgtactgagttctggcttctgtccctgaggccctgaaacctggctgctgcagcttttgattctgaccatgatccaagagtccttccaagcagtgagagcaagtaaattccattctttgattagcaagtctgagtagaactctgccacttaaaacaaaaaaagtccaaattaatacatctttcattattggaaaggaatcagaatatcagtttaacaaggagcccattttattttctaaaattaattttgaaagaattttctcacatgggacttaatagcgcatattgactgatgtaatggacaatgccctcaaccacatttttacagtaaatgcagaagcgaatttcatctgatggtttctagtataaaccttgaataaaagccaagggcataacattaaagcaaaattgagttaaagccattttggaagaattagcccagtgcacatagagtgttcaacatttgagtggctcaattcacccaagaaagcttcaagaagttgaaggacactttttaactttgacagctttcttcatgtgttcctttgtttccccatttacccaarcttctgataaaggttgaataacaagtattttgagattctaattttcaaccagagctaacattttccactactaagtgagaaagggatctaaatgcttcagagactgggggaaattagaggagagcaaagttatgctacttgtatctraatataagaccacttgtctctgcacagaattgacccctgtgggacctttggggatacctgcaagatatgcaggctgtttttttctatcaataaacyttggattttcaacaacacaaaaacacatcatcaattagatccccagagtcatgaaccaaaacagttttcacatgaaatttattcaaagtaaggatttgtagttacctgttgtgatatgggaaaaccacacagcagcttggcttccagtgtgctttccagagtgaattagttttaaagtgtttattttctttattccctcctccccaatttcacccagtatctgaaccaatgtatccatcaaagtagtgtaatcagagagtctgcctagaaatgtattttagttaatcatggctaataccaagcccttctttctcccagaaatcaggatgatgtccctcttggaattacttttgatttgtgactggttttgatcatgattacacttccagtacctggcgtaatacctagaacaaactcccagtaaatatttgccaaactaatgatagaatcagatttatattttgaaatgagcactctgaatatattctagaaattgtattggatgaacacaaaagtagagtgggaatgcagatgaaaggctctgtgcccacccagaggagggccgcttgtggcttaattcaggcagcaataatgggaactgagagaattgagctggtttgagagatatttaggaggtcagttggtgttatgaaaagataagggagaaagaaggaacaaggccagctagacatgttgtggggcccagtgggaaatgaaaatgctgagtctctcattaaaaaatcattaggaatttcaagagggtaatagtagagcaccaaactgtgcattgtacaggacttttactcataaagccagctctaagaataaaacatcctatattcattatgcccggggygcttccatttactcactgagtgcctaccatgacagccactgtggtaggtacttaattctacctaaaagcaataatacaggattaggatagaagcccaaatgaagaagaaaccaaacatagctccaatttatagcacctaagagcattttcacctgtaaggaattttttctatttttacaggaaaratcaagggatttgccctgattcttggagtacttaagtgcaaattttgaagcatttcaattgttgaaaacatatctttttttwatatactttaagttttagggtacatgtgcacaacgtgcaggttagttacatatttatacatgtgccatgttggtgtgcttcacccagtaactcgtcatttaatattaggtatatctccaaatgctatccctcccccstcccccaaccccacaacaggccccagagtgtgttgttccccttcctgtatccatgtgttctcattgttcaattcccacctatgagtgagaaaatgcggtgtttggctttttgtccttgtgatagtttgctgagaatgatggtttccagtttcatccatgtccctacaaaggacatgaactcatcattttttttggctgcatagtattccatgrtgtatatgtgccacattttcttaatccggtctatcattgttggacatttgggttggttccaagtctttgctattgtgaatagtgccgcaataaacatatcttttttttaaaacttagcatatatctatttgccatctcctgggtcaaaaagccaatggaaagctcaatgaaatctccaaatattcttaggttcaccttgacagatttttttctgaagagcaaaagagactataaaaaaacacttatcaaacatgagagattatgccttaaaaccacttaactcttatttaagatactactctgaaatatgtagatctgaaaacagggaagattaaaactcattttgctaatgagggcttagcccttgaggactccctgggtaaaattgtattatgggcattatctgggtccacactctgccctcaataacaagagaataaaactctcctctggtcataggtggagaattagcagcaccttgacattttgaaagaactagtctatcaaaatatataacagggttgtgacaaaagaatgaatggaaaaatcctctggtaggggtaattgcatatgattgatataacaaattatgattcagcatttactgagctcctacaggatgccatccattgtgtcagatccttctgcatgtgcactgagttaaattctcactgtaagattgacatagaccttatcactgaagatattaacaaatcctatcagttgagggaaattcaggttatgagaggtaaagtggtttatccagggttgtgtagctggttattggcagagccagaacttgaagctcgatcaactccacctataggtcaatactgtcctaagatttctggatacaagtttctgtattttcaaggacttcgttcatgggatttccccgtatcatgaatacctctctcttctgaatcatccctaatgcttgtagacatgttccaatatccctcaccttcaaaaacaaaaagaagatgaaacaaaaccttcttccttactgcactgctgttctcatttgctctgctccctttcacagacctacttcttaaaaaggcatttgtcatcaccatctccactttctcacccaaatttatttattacctttttgcttctatctccacattgccaaattcagtcacttttctgttcttattttattatgtctctggcagtatccaacaaagttggccattctctcctgcttgaaatactttttttaataatatattttgtcatctataacaccatatatcctcggtcttcctcttacaatccttttcggttttcctcttaccatctcctcgtagattcttcttctggaatacttttgccagttcttctgtctttgcttaacgaataaatgtagagtgtttctggaaatctttttctatatgctctttttaggtgacccctccagttgcttggccacctgtgtgagccatgtatctatgactctcaagcatagtctctcccctggacttcagacttgaccacccaacacccaaccaccaccttgaaatccccacttggatgtccagaagatttctcaaacttcacactaataaaacagagtcctagatttctctcctccaatcctggtccacctcccctgtgcttctacatctcagtaaacattaccactctccacttaagaaccttaagacagaaatctgaattattcctttttacttcctcatcaccatactaactcaatcagtatgccctattgcctctacctgtgaaacatctaagtccgttcactttttaaaacattttttaagttttttgttaatgcataataaatgtccatagttttggggtacatgtgataatttaagacattcatctaatttgtaaagataaagtcagtgtacttgggatatccatcaccttttaaaagtatttgtctttttataagctagaaacattcaaattattcttttccagctatgttgaaatgtacaatagattattgtaaactatagtcaccctactgatccatgtaacgctagatcttatttcttctatcaaactgtatatttgtacccgttagtcaacttctcttcatggtcacttttatacatatccatttctttcacccaagttaaagttactatcctatcctgcccgggctacacatggtctcctaacttcaacctcattggtctctttcgatttcttaaatataccaagcagattctttccagcttggtgcctccaaggtaactgtttcctctacctggaacactcttcccttgatccttgcatgatttgctttgtcttgtcattccatgaaaataacttttactctgaaaagccttagccaagcccctaaagtagccccacagtcacatccactctcctgagcacttgttaccatctgattatgtttgttggcttgttcgtttgytgactgtttggaatataagcttcacgagggcagctgtgtaccctgttcaatgggacatcctcaacacggaggcagggcctggtacagcacagtcctcaataaatacttgataacaaaataaataatttatgttgcattttggaataataattatattcttagttacacattagctgtatctagaagactgataatactgggggaccaaattaccttttaaaattatatttaagcctactaaacaacaacttctgagttaacaatattaagacaaataaagaatgacatggctcacaattataaatcagctatggttaaagatactcttaaatagtaaaaaataatcaagaaaatgttatggatttggcctctcaaattatgaccctgttgaactatacaaaatataaacaaagaacaatatctgaaacattattgaaatttactttataactgaaagttagtataagcagttaaaactgaaagtaaatatagacaaaataattgaacatatttgacaaaatatagacatctaaaagtgaaaagcattttaaaagtgagaaaactcctagagagtttgaactattatatggtattttcacctttagattatgaatagcatgaatgagatgataacaatggtaataacaataaattcactataagttcttakaatttagaagataccattctagaagctttccatgaattatctcattaactattactgcagtcttatgaagtgagtattatgatcatttctaatcttatgcatgacaattgagatttaaagagtataactttccaaggtgacaaatttagcaggtgtcagaatccagttctgtcagaagaaataagtagaaaataaaggtgggtttgttggcgactagataatcataataaacattgatataatcgtttataatttttcataamcgtagaaattatacaacctgtgtaaagccaaaatactttggtgatttctgggttcagaagataatgccttttgtagctatggagcttagatcttgtagctatatgtgtttgactgagggaagtggaaattctctaactgggatatcataccaggatgatgaattacctgtgcaaactctcactattgcaaggtcctatctacctggaaatataagattaaggtttgcaaatccacttgggtaagtgtgtctcaagattttaacctatttacttataataattttcgtatttgccacctaagttttatacacaagactaccaaggaatagacataagttgcaagtggtcacagcttgacctgaaaacctatatcagtaaaccagtggagctctccttagaacagtaaggaaaagaagtgtaagatatgacttcagctgatacagtcagcaaatacttcttggatctatctgtcccatacactggtccaggccctggaaattgagcagaggtcaaataacccacttccctcatgaaacttacattgatggaatgaactactttttatatatttaaaataaaaataatatgaaaacttgaggtaatgaatgctgggcacagtggctcacacctgtaatctcagcactttggaagactgaggcaggaggatcatttgaggccgggagtttgagatcagcctgggcaatgtagcaagatttcgtccctactaaaaaaaaaaaaaaaaattagatgggcatggtggcacatgcctgtagtcacagctactcaggaggctgaggtggaaggattccttgagcccaggattggaggctgcagtgagctatgatggcattactgcattccagccttggtgatagagcaagaccctgtctctaaaagacaacaacaaaaacttcaggtaaaagtaaacctttctttcctttcatgtcagagaccacatattgcaatgagagtgaaatcacatgaaacttataaataaaactgcccttctatcagaatgaaagaaaggacaggaacaggtcaacttggttattttctctctagacccgtcattgagggtagccaccagagggctacctagccatacctaggtcacatacctaagtaacctgatacaaaactttctcctacctcctcctttttcccacctgtgaacctaacaccctgaaatttagcatctagaagtatctaaatgaagacagacatataatttttgcccctgagctcccacccttttggactggaattggacatatctctggagccacaaatcagagtcacatagatgtgactgccagcttttgtgacttggactcagtatctttttactgcgccaccttacgtttcactcagacaccatctggtgatggattggtccgtcatgcggtatcagtctgcagaatcatcttcagtactttaaggacagtgcagactagaggaaagattccaggttagatgtcagctatttgccaattagatgacctgggtatgtaatgagaatgcatagccccacttcgtctggtaaattgggactgtaattcttactttgtyttagcccacaggatgatatgtatagaaagtgagttataaactgtaaatgaagctgggcacagtggctcacacttgtaatcccagcattttgggaggccaaggagggaggatcacttgagcccaggagtttaagatcagactaggcaacatagggagaacttgtctctagaataaaatagaaaaacatagccaggagtggtggtatgtacctatagtctcagcaacttgggaagctgagctgggaagatagcttgaggggaggagttcaaggctgcagtgagttgtgattgcaccactacactccagcccgggtgacagagcaagaccctgtctcaaaagacaataatattataaataaataaataaacaaactgtaaatgrtacaaatataaaagagcaatactaacgacaaataataatacatataatgaatgcattgataatgacagtgaaagttagaagtgattcttttagcacagagataagagattagctcatggctcaggccaggcctcacagattatctgtctcctggtgggactaatgcaagatctgaagtttggtctgtaactttgtcattttggtttgttctatggaccaaactctggagtactgattaacatcattgtctagcagttgaaagctctctgataaccttggrgagtgctagatagaatagatacaattttgccttttgattttcctttgcccaaacaagtggttcacatatgaagatgtcttttggaagggaaaaataaaaattacagattcccatgtaatagggaaactgagtcttaaaatccaacaccaccatcttatttctaagtcgtttttacattagggcttgttataaacctaggttattttgttttgcctacgtgtaaatcttgatggattcaaaaattccccaagtaacttagtgagatttcaaaaagrtccttgattttagcagcgtttttataaaactgtcagttacagtagataacaatagcaattctattctcctccattttaaactggaatttactgattcaaatttttaagagaaaaagttcctgaacttgtccccttattctaggggaaaccattttggtgcctgtctatagctacttatggcctctctctcttgttttttgagacggagtctcgctctgtcacccaggctggagtgcggtggcaagatctctgctcactgcaagctccgcctcccaggtgcatgccattctcctgcctcagcctcccgagtagctgggactacaggcgcccgtcaccatgcccggctaatttttttttttctctatttttagtagagacagggtttcaccatgttagccaggatcgtctcggtctcctgactcgtgatccacccgccttggcctcccaaagtgctgggattacaggcgtgagccaccgcgcctggctggcctctcttttttgaatgaggtaaaaaagaagcttgagaggcaaaacaaccaacagcaaataaccctagtgtattcattcattctcacactgccataaagaaatcctggagactgggtaatttataaataaaagaggtttaaatggctcatggttctgcaggctgtataggaagtacagtggcgtctgcttggtttctggggaggcctagggaaatttacaatcatggcggaaggcaaaggaggagaaggcacgtcttacatggtaggaacagaagcaagaaagagagccaggaggtgctacacacttttacaagaatttactcaccgtcacaacagtaccaagggggatggtgttaaaccagtcaagagaaaccacccctatgatccatcacctcccaccaggccccatcttcaacactgggaattacaatagaacatgggatttcggtggggacacagatccaagccatatcacctagtaatcatcctcaccttcagttaaagcagcctgtgtgtttactrawgaaattagctacttgacaccaatcttttcagcaatactgctgtcagataagagaatcattgagtaaaatgccattaattgcaaataataaaacgtcattcattcaaatcacgtaatgagaagtttgaattctgtctccaaaaccaacccttacttttgtttatttatttttacctagtacccagggcatgattctgtctatgctgtcataggtctttagattttagttgccattagcaggcattttcattcaatttatttatttatttagagacagagtctcactctgttgctcaggctggaatgccgtggtgcagtcatggctcactgcagcctcaaactactggcctcaagcaatcctcctgcctcagcctcccaaatctgtggaactgcatgcatgtgccaccacatctggccctggaatatgattttataagaaagctgtctctctattaaagttttatgcraagaggaaaactaaatcagtggacagagctaagagttagacracccagactttcctccctccgttgcctctgtttctgtctttgcaaaataaggaaatttgactagcttatctttaaaacctctacttgctcattctatgatggtgccttgagatggagattcagtgagagattcttgtttcagtgcttttatatatttaacaaattttcaccgagtacctattacgtgtcaggacctgctctaggaaatgtggatacaacaatggacaaaacggacaaacctatgtcctcatgtagtttacattctaaggcctataaagtattgtctatttgaacacataaaatgtattctcccagtttgggcagaaacaggacttctgcaaggcctggagaagtaaggaagactgaagcaaatggaatccatggcactttccaattttgtactttctctttctgtctctccttactttcatttcttgacctactcctagacccatgcagataccaaattttacaaattttactaccagcaaatagttatctattatgcagttaaactgtgctatgtgtagggatgcagagcaaatcaagacatagcatatgccttcaagaagccaatgatgtccttgtgagaacaaaactcacatatgtaaaaaawaattgctagttcaaaatgtcagaggctgagaaccaggaatatggcctgaacagttgtgtgctctatcaggagagattcactaaaagttagtagacttcaggaataattttcagtgcacataaagcttgaacttaagtaacataggtagttttcagattttaaaagcaattttcagtaaatacaagtagagatatggcctgcaaaataagagtaggatatagcaagacacatttcttattcttctgacaaggtagtacacagttcatcactttattgacaagatttattgatgtgactattgtgatgtcatcaacaatggctttgaagttcagaacatgagaaagagctaatggtagggactgacttgaaagcctttgcattctaagaatgatgattaggtttctaatgtattattaaataatgtccagcccacaaaaaagatgaagtctgcaaaggtatacacaataactctgtgccttgctatggtcctatctgatctcaaacaagaagctctttgggttgtgttgctggtggttggatgtgttctgagccatagctaggcttatgcacataacaaagtctgattcccaggaatctttttaggaaacacctcccagattaagtaatatttacctacttgtcctctttgaacagtgctcctactgattctttaccctaatgaagttcatgtcccaacccacacccttttcctaaaacaattaagcttttagtggtgacatgatgaaaaagaaaaaaaaaaaatagatgcaatggctgacttttggaaagttcccagcaaaaaaaaatcccggtggctttctgagtctcagcatgtttcttcttagttctgtgtacactgagataaaagtagagtgggagactgagtttaccacctgtgctaaagcagcagctgttagcattggtgacattcattgttacatggatatcaattgagctgggattaggaagccgcctgtctcctcaagcttgttacgattcagtcacttggaaaaaaacaaaaacagactttcggatgaggattctaatkcccaggtgacctgaaagccaggttcagcgtagtcaatgagcaacatgaaatgaaatttccaatcagaattctcattagccttattcagcactacccagatggatgttccttttgatgtctttgtcatagcagcctcacctatgcaaatattgccagtattaccccttatagtaagttgaagaacttttaagggttgtgaactttacataggtaagtgaatcaagtatacttgaagagcctctctgttgacataagtaattagattattggacaaagatctgatctagtaattttcttagtatgtatgtgtgccaaagccaagagaggatatgttattaattagcaagcaaaatttctaacgtaggggttttcccacatcttaagtaaaattctcgaaacctggaactatggctggctctctggaggtgtttcataaatgcttgctgaattaatgaatgtatccacaggcatcttttaagtggctacaatgacattaagaagaaataaggtcacagagtgtagttgccgcctcaggctctgggaaggatgggtctggaaacaaccccacagtagaccatacacattgtttttgagactttcagctcatccatttggttactgattacaagacggtttttttttttcgtctcaaaaaatgctttatttctcagaatcccatttcagcattattggtttttccctcaccaattctattttcagctttctgccttttctcataatgacctgtaggtgataaattagtaataataaaaatcaataaaaaatgataaagttttttttgggggggaaataggaatgagtttcatgttaagaaaagaaggaacgttccagatggaattttctgtaatgttaaatgtacccatatggcttctgggaaatttaggggcatccttttgtattagggtaacctaatgccacctgctttaaaaattcatattaggaaatagccacattttgaccttcttgaacgatgttcctttatcaatcaaaaatataaagggtgttttatttattagtcattgttgaaatccgtaatctctttctatcgccaaattgtcttaaaacgtctgtccagcacatcattgcaaccttgactgtcccttccactgtgtgttgaagagtcacaggtcccagggggagctgcgaagaaacgtaaaccaaataccatttcagtaactgttaagggacaattgtgacgattttgtaatgcttgrcatgttttgcttataatcttgtcctacaaagaagcctatcagcagagatgagagatttttgctatgcaaagattagattaatattgatatttgcagaactgggttcaacctgtgggagacctagtcgcaggtcttgtagaatttatagcatattaagaagatatttaaatatttggcttcagtgtgatggcctcatttctacatacctttctaatatgtgccaactctctcttcttcatttcacttgtccgctgaaagatgagtcatcaagtctggttgaacctatctaatatctcttgaatcagtatgtctctgcatctgtattgccatcaccctagttctggccatcctcactgaccacctgactttctgcctaaatggtctcctactttctggtcttgtatactttcaaccctttctctgcaatcagagtgatattgcttccartgttgtacagacaattcttacaaggtcctgcagcttttctttcagtctttctttcttttttttttttttwttttgaaatggagtctcactctgtcacccaggttggagtgcagtgggcgcgatctcagctcactgcaacctctgcctcccaggtttaaacgattttcgttcctcagccttccaataactggggttacaggtgcatgccaccatgcccagccaatttttgtatttttagtagaaagagggtttcaccatgttggccaaactggtctcaaactcctgacttcaagtgatctgtccaccttggcctcccaaagtgctgggattacaggcgtgagccactacacccagctctttcagtcttactgttcgtcatttttttccctcccctttctgcaccctcttcactctgctttcccattctctatgcctgggctacatcttaaaagacgccatgttctcctggggtctctggtgtccctgattctggaaatgctttcctgtctcttctctctamcccatttcacttagataagtcctatttatccttgagatttctcataggtggcagtctttttcccataagacttttcctgttctagacctggtggctcacacctgtgatcctagcactttgggaggcacagccagggcgaatgaacccaggtgtttgataccaacctgggcaacatagtgagactccatctctacaaaaaataaacaaccaggcrtggtgatgagcacctgtagtccaggcatggtggtgagcacctttagtcccagctactcaggagsctgaggtgggaggattgcttgagcctgggaggtcaagacttcagtgagccgtgatcatgccactgcattccagcctgggcaacagagcgagaccctgtcttaaaaaaaaaaaaaaaaagaagaagaagaagaaaagaaaaactttccctgatatatttaggttgagactagacaccctcttatctgctcccacaatgcccacgtcctccatcactgtactgaccatactctggtaattggctgtttatctgtccaatgccttccctagaccagaagctcctaaaggacagagcctgtattcccattcgtagtaccagcgttcagcacagtagctggacctgactaagcaccaagtaaatatttgttgaattaagaaaattaaaaaaaaagtgagaagtcaacagtctcttaatcaattgtaaagaaacactttactaggatgttctgacagctactccaaagtatcaaatattttaagtgaaattgtgatgtctggtgacattttttcaatattttagatttcttacacacaacttattttattttcatccactgaagctctcaagcatcttgttaaaataaaataaattagcttggtttctgtatgtgtgtgtgtgtccttttttggggggaggggggctggtggcaggacagggtctcactttgttgcccaggctggagtgcagtggcaggatcatggctcactgcagcctctacctcctgggctcaagtaatcctcccacctcagcctccctaatagctgggattacaggcatgcaccaccatgctcaggtagggttttttwaatttttcatagagacaggttcttgtcatgttgcccagtctggaatatatatatttttttgacttttattttaggttcagtgatacaagtgctggtttgttatatagataaactcatgtcacggggatctgttgtgcagattgttttgtcactcaggtactaagcccagtacccaatacttactttttcttttcctctctccaccctgaccctccacgcccagatagacaccagggtctgctgttcttgtccttgtgtccatgtgttctcatcatgtagctcccacttaaaagtgagaatatgtggtatttggttttccattcctgtgctagttcactgagaatgatggcctctaactccatccatgttcctagaaaggacatgatctcgttcttttttatggctgcatagtattccatgctgtatatgtaccatattttctttatccagtccaccactgatgggcatttaggttgattcctatatattttttaattgacaaaaataataacccacagaatcactaagtaggggaaagatcagctgctgatattttggatgtacttttctcgagtccaaaggataattcagtcaacttaaaatagttatttaaaaatgtgaacagaatttgtggatgttgagacagattcacagatccttaggaaatattaaaacttttgaaaaatggccacaggctctgaaggaaaagagcagttgggcacttaatgccacaagttactcttataaatcattatgctaatgatagaactgaggtggttcatttgggaaaaaaattgaaataacatttaggaaaagctgagaggctggcgatcaccattatgaagacagcagcctgcactattattagatgccaccaataaggggaccatatataactgaaggatgactttaggagtcattgtaaacctgtcttctgacagcagcttgagacaggaattgcattcttcctctaaatccttttaatttagtaaagccctttattgaaacatttacaagcaaatgtaaacttttaaggattcttacatcccataaaagcagtaattttggcatatagctcatcaacatgaaatgagtaaaaacatgggaaggcagtactttttgaatgttgtatgccatttggcaaatctacatgttcctcccttttttcgcatctccatgttcctcctaaatgaaggagttgttgttratgttggtttactttaatatgtccaattataccattatcatctatttatcaaaatagtgccatttaattgccttttgctttaagctgtattttatatgaaagattcctagtgttatttctgtcctttggaatattatccagcagagggaattttaggatctacttgataatacagatttgctaatttccacgttagtacttcagtgttgtttagttacacagtttcgggcctcatgatgtgtttgatgatttgggagtgataaaatgagtcttaagtaaaaatcttttaattaaaacaaacaaaggatcagtttttatgggaaaccagtcagtcagcaagtacatgtgttttaagtccagaaggatgctcaagtggaggggtagagagagagagcccttgggatccagggattgtagagtaactgctcccattatgccaggcctagcagggctgtcccactgtctctgccctcacactgaccacttcattactggttgtttttactgagcatcttttcagagatttctgagaacatggtaattttcccagaccatacacctgagagatcaggtactatgttgcctttaaaaacaacaacaacaacaacaaaaacctttatatttttcctctttttatggtgaaatatggcatactttattatttggagaaagacagaaaacatggtttttttctcccacaggccacaaaataccatcttcctcttacagggaatgagacttttgtataaagaggcacaatttcctgtcccactaggagaaaattattctcttgtctgagtctcaacagaagcttgtgttagttgctgttataaattaaactactactcaacccagcagtcccattactgggtatatatccaaaggaatataactgttctaccataaaaacacacgcatgcttatgttcattgcagcactgttcacaatctaaaagacatgaaatcaacctaaatgcccatcaacagtaaacaggataaagaaaatgtggtacatatataccatggaatactatgcagccataaaaagaacaaatttatgtcctttacaggaacatggatggagctggaggccattatccttagcaaactaatgcaggaacagaaaaccaaatactgcatgttctcacttacaaatgggagctaaatgacgagaatacatggacacatagaggcaaacaagagacactggggcctattgagggtggagggtgggaggagggagaggatcagaaaaaataactgttgggtactaggcttagtacctggatgatgaagtggtctgtacaacaaacccccatggcacaagtttacctatataacaaacctgcacatgtacccatgaacctaaaataaaagtttaaataaataaataaacttggtctccagtgttaaatatgatatgtcatcatcctcatttccttcatccagctattttatattcctcccatctgctctgtcctaatatttatattctgtaggccttatcgtgcatctcttattccttctaaatatgttttaytctgcctggttcctccactcttttggctcttgttttcctacttcctttaatgtaacagtaacacagtgagcacttaatagcagtctagaataaactctgtgttcctgctttaatctatatctggtctttatctctcacctttatctttacctctgtcactgtgtggacttacactgaaaacagaactataccatgcccccatctccatgctgagtagctggtttataaatcaggagagacaatgctctttagatattcttaaatttgttataattctttcctgttatccagctcctcaacctcccttcccagctctgtctaccactttgtatcacttaagccacgttttatctacgtcttctctgtcactaacctttagtcccttgaaacaggcacaaccaaacaggactgacattttgcaagtcccttgagattttgcctaatccttcacagcaacctacaaagtcaatctggggctggtggaaattctcctctttcagccttttccttcttttggaatttgggggtgttttcacagagtgatttaccaagaaaacattctaaatcctcaaggatcacttatcccttacctcgtggttgtttgctcgagaccaagcacaactggacatttttgaacttacgwctttctccctaccctctttgttctccttctcccccttcataaaatctgacttcagtttggccttcaagtgagattgacttttagccccttccatttggcaaatccttcaacaaaaaaacagaagtgtcatttttacggggtgacaaagcattaagaagatcgctttttcagccttgctgtgcttcattataggtaagtcctcatgtggcaccttttacaagaggaagtattgtcatgctaacaaaatggtttcagatagtatgaaatcagtggtgagaagaatggctataaggaatgggctctacaattactgtcactctcagcaaaagagaacgcaaggaatgcatatttcatctcatggcgacctgaggatcgtcctcaattccatatgtaatactttctaaataatggtgacctttttcacgtccccttcctgtatatacaaagtactatgtggataatgcagcctgagtgagcttatgagctaatgcagggatttttattattaacaataatmatagtgaacaacagtttattcatgtaagatcaagcaactagtaagtggtagaaccaggactgggtcatagggtaggtacatgtgtaccacttttaaatattgccaaactactttgcaaagtattgaattattttacattcccaacagcagtgtctgggaattacaataatccttatcatgcaatgactggcgtattcattctttttaatttttgacattctaatctgtgtgtagtgccatctcattgtagtttkaatttgcatttcgctagtgactaatgatattgagcatcttttcatgagcttatttgcatatgtatgtcttctttgctaaagtgtctatgcaaatcttttgcccatttattaggttgtttgttttcttatattgagttataactttttttttttttacatattctgcaaacatttttaaccagatatgtagtttacaagtgtgttttcccagtctgtttcttacctttacattcccttaccagtatcttttgcaggaaagatgttaaatctgttgaagtgtagtttatcaagttttttctttggattgtgcttttggtcttgtagctaagaaaactttgcccaaacaagataacaaggattttctcctatttttttctaggcatgttatggttttaggttttacctttatgtctatgatccattttacattaatttttatatatggtgcaagttatggatcaaagtttagttacatgtggatatccaagcatcctaagcatcttttgcccaaaagataatcttttttatactgagttacctttgctgctttgttaaaaataaattgactatgtgtaagtctatttctggtatctctattctgttctattgatctatatatacttatccttaaaccagtaacacgctgtcatcatgactttagctttataataaatcttgaagtctggtaaattaagtcccccaatgtttttctttttagacattttttttggctactgcaggttctgtgtattttcagaggacttttaaaatcaacctgtcaatttctaataccaaaataaagttctttagaattttgattgggattctcacgaatgtgaagatcaacttggagaaagctaacaacttaatattgagtcttatctctcaacttattttggttctttaaaacttctttcaacaattgtttttcacatagagatcttgtatatattttgtcagagttcgcccaaatggtacatttatttatctatttatttagagatggagttttgttcttgttgcccaggctggaatgcaatagcacaatctcagctcactgcaacctccacctcccaggctgaagcgattctcctgcctcagcctcccaagtagctgggattacaggtgccagccaccacacccggytcattttgtatttttaatagcaatggggtttcactatgttggttaggctagtgttgaactcctgacctcaggtggtccacctccctcggcctcccaaagtactgggattacaggcatgagccactgtgcctggcccaaatagtacatatttttgatgctattattaatgacattgttttattaatttatatttcaagttgtttatttctattacagagctttctctactatgctgacatccatctgaggtctcttctcaacagaattgmctttaatgtccacatttctaccaagcttctcttcaaggaaatctatattttttctattactcaccttaaaattcttgtagcctctatccatttcccaattccgaagccatttctacatctttaggtgtttgttagaggagtaccccactttctcgcatcaaagtctgtatcagtcagtgtttgacagagaacagaaccaataggagatggataaataggtaggtaggcagattagtaggtagatagatagataggtagrtagatacatagatagataatctatagatatctaatgcctggaaagctaatttttctatatattttctctattattttagttgtttcagatagaaggacaaattggatccctgttactctatcttgaccagagtgaaaatctgattaacttttaatcctcagtctcctcatttgtaaaaygaaaataataataaaatctatttcatgaggttattgggatgttagttttgttaatatgtataaaaacttggtgccttgtacataataaatactcaataaatgtatttaaattttgaacaacatatttgacatattgtgattwmcaagtatctatactcttttatgtttgttaatgttatatatggaggcaatctgacttaacatcaaaaaaaaaaaaaagaccattcataagatgtagtcagtaccagtaaatgagagcacattttcctctaattgggtgtgtggatattggttttcaccctacttggagtttctgactatttgtcctagtgaccatcactatattcatttataatattattaaaatcaatggatgagtcattggttaccatgtgtattccggttctgaaacacaccctcctcttccccagccagcactcacctcagtgatacccagtctattgcaggttttttatgcattttctaaattacatgaaagcaagttgacattctttctttgtcttagtcttccataccattattttggcatgtttaaagtatcatccatctgattatgtttggaaataaaagcatgaatttgttaaagacatgtaccttccaaactgcacacttattgtgttttcactttcttatcattgtcccttcattagagaaaaaaatctattctgtgaagtatttggttttttatgcagtctgctctgctctaatatacacaaacacctgattctgcaatgagaattagttggtatgtgattgttgagcagggaaatagtactatttcacagaatttcctttagtttatatatggatttttcttggctgaagaagccagattactggagtaaaattataatctccagcaaaaataaaaaaagaaaagtccacagctcagcccctcctctaaagagttgtacagcgcagccttccacggctcatagcttacagcaggtctcccttccctgccaccaccctcacagcaaccccactggctgagcactctgtttttatttattgtctgagcactcatcagtgcagctctgtttaacatgttacctgtatttccacccaaattttttttttttttttttaagaccaggtctcactctgttacccaggctggagtgcaatggtgcaatcttggctcactgcaacccctgcctcccaggttcgagcgattttcctgcctcagcctcccgagtagctgggattacaagtgcccgccattatgcccatctgatctttgtatttttggtagagacagggttttgccatgttggtcaggctggtcttgaacccctgacctcagatggtccacccacctcagccttccaaagtgctgggattaattacaggtgtgagacactgcacccagcctctaatattttttagaacatccattgtggtagcctcctgccatgctgaacagttggcctgggtggtgcaagttatctcccaattattgggaggtatcaattatcatttttgtttggactttacaaagttttataggttctaagtgatatatcccttctgcagtttttctcataagttctgtttatacagtatgtgattttgcagaatatgagttttttgagattatatatattgcaatatcatagaaacctttttgtttgataatctttgcttaaaataacctcatttattttgtacgaatgtacaaaaataaaacaatgtagtacttattggctgtttttgtggactgaggtagagatgtcaagaagttcaagccaaaaaaactgaaaatagttaacagaaacaggcaaatctcatatatcttgccctgattattttttcattagagtccctcctattgaggaaggttcattagcatgtgatgaaacacattgagggggattaattaggaaatataaaagagtctcaaacttctgatataaggtaaaacacgttaattttatgtgtctttaaaaatgtaattagaaccttctgtttgtcttttctgagacacgtatttaaaatttccctcgactcaactgataatctgtgattttgattttcatcccaaagtgacttttaaaaaagttttggggttagggggatgtggtggctcacgcctgtaatcctaggactttgggaggccaaggcggggcagagggcggcagatcacctgaggtcaggagttcgaggccagcgtggccaatattacaaaaccccttctctactaaaaatacaaaaactagccaggtgtggtggcaagtgcctgtaatcccagctacttgggaggctgaggtaggagaatcacttgaaccccagggcaaaggtattagtcagcagagattgctccactgcactccagcctgtgcaacagagagagactttgtctcaaaagaaaagttttgggtgaaaagtagaaaaaaagtcataactttgtgtagagacttttccctcctgtaattctttttattatcaaatatcaggtattatagggtataagccagtgttcttttttatgatttccagaagtgttaaattttccatgtcttctgcatttgaaagtaataggtttggaaagagaaaagctgttcattcttcaagtacatgtaagtttaagtaccttgcagactttgttttgcaggaagcttccttgccttctccccatatcacctctctgcacctcttcacacccatgagggtctttatagcagtgcagtccataaattgttttgaggtaccaataccagtttcttggatattttcttacttaggaacataaatacttaggctgccattgcgttaataaggaaatgctggatagtcagaatcctacattaacccgagcctaaaatctgtagtatcgcttcaaatatctatgtagaaagcatagtttattaaactaaacatctcctgtaatcccagcactttgggaggccaatgtgggtgaatcacttgaggtcaggagtttgagaccagcctggccaacgtggcaaactmtgtctctaccaaaaatacaaaaattagccaggtgtggtggtgcaaccctatagtctgagctacttgggaggctgatcacttaatttaaaacttaaaagacctaatatccagaatctataaggcacttaaacagattcacaagcaacaaacaaacccattacaaactgggcaaacgacacgaacagacacttttcaagagaagatatacacatggccaataagcatatggaaaattacccaatatcactgatcatcagagagatgcaaatcaaatccacaatgagataccatttcacgccagtcagaatggttattattaaaaggtcaaaaaataacagatgctgacagagtaaagggaacgctcatacactgctggtgggactgtaaatcagttcagccgttctggaaagcagcatggcgattcctcaaagaacttaaaatagaattatcatccaatccagcaatcccattactgggtatgtacacaaaggaatacaaattgttctatcatgaagacacctgtacacatatgttcatcatagatagcactgtccgcaatagcaaagatatggaatcagcctaaatgcccatcaacagtagattgaataaagaaaatgtggtacatatacaccatggaatactatgcagccataaaaatgaatgggatcatgtcctttgcaggaacatggatggagctggaggccattatcctaagcggactaacacaggaacagaagagtaaatactgcatattctcactcataagtgggaactaaacaatgagaacctatggatacatggaggggaacgacagacactggggcctacttgagggtggagggtgggaggagggagaagatcagaaaatatacctatagggtactatgcttattacctgggcgatgaaataacctgtacaccaaagccccatgacacgcagcttaccaatataacaaaccagcacatgtacccctgaacctaaaatacaagttaaaaaataaatacataaaaatttaaaaataaaaaataaaactgcaaacgtgccctgctttctggcagtaccccattccctgttccttagttttctctctggcacttatcatttatctattttattcattgtctgtctcccttcactagaggttcatgagggcaaggattttcatgttctgtccactgctatgtccctaacacttaaaaaaaggctttgcattctatagtcattcgatgaaataggctgaatttagctaaaagggagttcatgtcctttgaagaaacatggatggagctggaggccattatccttagcaaatgaacacaggaacagaaaacaaaataccacatgccctcacttatcagtgggagctaaacaaagaaaacacatggacacaaagagaagaacaacagacactggggtctrctgagggcagaaggtgggaggagggagaagatcagaaaaactacctatcaggtactatgcttcatacctgggttacaaaataatctgtacgtcaaatgcctgtgacacaagggtacctgtataacaaacctgcatatgtacccctgaacctaaaataaaagttgtttgtttggtttttttgtttgtttgtttgttttgagacagagtcttgttcttgttgcccaggctggagtgcagtggcgcgatcttggttcactgcaacctctgcctycttggttcaagcaattctccctgcctcagtcacccgagtacctgggacaacaggcgcctaccacaacgccaggctaatttttgtattttttagtacagatggggttttgccatgttggccaggcttgtctcraactcctaacctgaggtgatctgcccacctcggcctcccgaagtgctgggattacagttgtgagccaccacgcctggcctaaaagtttttttaaaaagagaaaacactttccttaccctttgtagctcattgtctatctaacacaccctgtcactctcatcagccttgaacttcttacaaagccattcaataaaatgaaaggaaataggtgcagtgggccccctctgattcgtggctttgatttctttggtttcatttatccacagtctaaaaatattaaatggaaaatttaaaaaaaaaacaattcataagtgttaaattgcatgccatkctgagtagcgtgatgaaatcttgccctgtyccactctgtcccatgcgggacatgaattcttcccctttgtccagcagttcctcactgtctatgcctccgacctgttagtcactcagtagccctctcagttattagatcgaccatggcagtatgggggtgcttgtgttgaagtcacccttattttacttcctaatggcctcaaagcacaggagtagcaatgctggagatttggagctgccaaagagaagccctaaagtgcttcctttgagtgaaaactcttaataaggaaagaaaaacattgaatgctgaagttgttagatcttctatctgttgaactgtgaagaagaaaaaagatatttgtgcatagtatataaagggtttcgtactacccacggtttcaggcatccactgggtgtcatggaatgtatcccctgaggataaggggggattactctatgtattttcgtatccttacatcacttacattatttttcctcagccttgttgaggaaaataaaaacacagaagccaagaaagaaatgagcaagcactggccgggcacagtggctcacacctgtaatcccagcactttgggaggccaagacgggtggatcacccaaggtcaggagttcaagaccagcctgggcaagatggtgaaacgccgtctctactaaaaatataaaaattagccaggcacagtggcaggtgcctgtaatcgcagctacttgggaagctgaggcagagaattgcttgaacctggaaggcagaaaagttgcagtgagccgagatcatgccactgcactccagcctgggcgacagagcgacactctgtctyaaaaaaaaaaaaaaaaaaaagaaagaaaaaagaaatgagcaagcactgaacacctactgtgtgcaaggcacttgatagccttcctgttatttcttcctcactacaatcccatgaagtagttcttatccccattttacaagatacaaaaattgactctcaaaaagcttaagaaatttgcttctagttgcacagtcttatagattttcacttttataagataaaagagcttattcaaatccaagtctgtttgaacctgacaaggaaagccttctctaaatagagtatctgaatccctccctgctcgaaagtctcctttatacgctcatgtttcaaaaatttcacattttttgagatatagatagtacccacccacatcacctctgtttttatggaaaatttacacttaagtggcaattattttaatcagatcgacatcctagagagtgagagttcattgaggaaagaaggaaggtacatttttggatcataatgaggagagatcttgatatttttgaaatttgttttgtcttcccatggtacaaagttttaaaagtacaaaaatatgaacagtaaattctcccttctctcccatccctgtctctagccacccactcctcttctgaggcaagagcagattctgttgccaccttcccaagcaggtagtgcctttaaaaaacaaaaaacaaatgttcacctactatatgcattaccatgcaccttacacttttcatttaataaatataccccagcaatggtgatagcagattttggaccagcagtggggataaagaaggtcctggtcacctaggtgcctaaagagaagcagrtgaagagagaagaccctggagaaatgttttcctgttttgcacctgcaggtgcttgacatgcctctgaaaatgatctcagtgctgtgcagttccacagctgcagtggtacccacaatgccaaaacttgggatgcaaaggggcgggggtaatgacaaaaatcagggaaggaggaaccatagcaaccacctgatctgcacactcatgtattttatatacctctcttcaatgcctagtgtccttagacagtaagctccctgaagacacaggctatgcctactttattcatcatcgtgtcttcagtgcctagcaccctgcttggtatgcattcggttcatgaatatatgagggaacctgctgctgctgttcagcattcacacctccatttcaaccccatcagaaccttyttcatgcttcctcttttgtagtgtctcagaaactcattctgttttcttcttcatctttttttttttttttttttaatggagtcttgctctgtggcctaggctggggtgcagtggcatgatctcagctcagtgcaacctccacctcctgagttcaagcaattctcctgcctcagcctccctagtaactggggctacaggcttgcaccaccacacccagctaatttttatacttttagtagagacagggtttcaccatggtggccaggcttgtcttgaactcctaatgtcaagtgatccacctgccttggccttccaaagtgctgggattacagatgtgagccactgtgcccagccttcatcttcatcttaaaacttcttccatgttcgctgtggctggggacatgatattcctctttccctcccagttgctcctaaggatgagcaaaaagctcttttcacgtcaggggttgtaccgccaatcactaaaaggaacagttgaaatatcaaacatggagaaattgcagtgattacaaaggaatgcaatggggcaccatacagatctgaatttgccagtttgccatatccaggctgtccctgttgcctctggtccaccttaagctaggtgcaaacccagttggaggaaagaaaggaagttatgtgttctctcttcaaggaagaaaccagataccagcctcaaactcttgttcttaggtcacttctttccttggtccatttcactcctcactctccattcaattaaaggacttgcagattaggttatttgcaagtatttctgtaatttattctcctactcccatttgaagccaccaagcctgtttaatattaaataagcaaatgcttcaagtactatggtgacttcttctgtgcctttgcaactaaagccttccaacagcagaggggagaaatttatatctgttatatacatagatgagtaatttgggaatataaaacaaatatccttcttagaaatatttaaacacagatgcttgattttgtctgatctttctctctcttttttttctctccaaacaactggttacccacacttgtacagtcatgtagagacaaaatgctcatttataattccagataccccatgtaattattgcctatgataatcaggtaatctttatgaaactattcctatacaattttcaaatctcagtttacaatcatgagtattttaccataatcttcataatgccctcttgawtatatttgcttaatatcattttgaatttagtgatatttaagttaacatattttatatgttttcatttcattagtaggcttttaaaaatttacttttttgtgagaatctgatttttgtgagactctgtgaacaaatatcctcactaattctttctaatggtataatgtgaatttgtcattgacaagtgttacaaaaaagacgcatagaaaataaaatattttaggtaatcctaagatagctcttccgcagccagggcaattgggctatgtgtctttgggttgattgttagctctgtcctaaatctctgaatttggagaaggaaaccctggatttgaattccagttcctcaacttactggctccatgttcattccttctttgtcaagccccctaacttccctaaacttcagtgccctcatcttaaatataatgacataatagtgtctctcataagattggtagaattacatgggataattcatcttgcatggtcaggggcacggtctcgggaaccagactgtgtgggtttgagctgctcagtcttggacaaaagattaaatatatctrtgcctttgttttatcatctataaaatgggaataaccatagtaccttattcaaaggttgttgtgaagattaaaataaattaatcctgtaaaaatgcttaggtttctggcacatagtaagggcttagtaaaaactaggtatttttacctggtatgtgcaagcactgtatrtatcctgatatactttctcatctataattctgtttctgtgcactagtttatatatttatttaatggaattattttctacagatttagtcagattttagaacacaaagcaagtggatacttagtagccataggggaatctgattttgatgtctcctacccaaagtttattcatatttaatattatatatacataagtcttattctttctcttcgtcctttttttttaaaggcaagatctgccttcatcttcggttttctttagtgcttagaagattgccttgctagtgataagtatttttgcttaataagtatatcttgactgtgaaatttgtcaccagttttgaaaggaactctggcagcaaatgaacaaacttaaatccttgtggccagggatcaaaggcaatctcaaaccgaattctataataaagagaagtttggagagagaaagggagtttagtgtaaactcaacttttgaaatccaaaggtatcaggctatcatgggaagagtgtgggattcagctttagccctggggtcacaaagtcatgggtatgctcttatataagtaacttaatcagatctctgtttcctcatctgtaatattaattcccttctcctatttcatagaaatgcttaaaatttttaacagaggtaatatatgggaaaatgctttgtaagctataaaattagtgtacaaatattagggtcactgatactctgtgacgcaattcaatgatttggtagaagactatatatatatgtgtgtgtgtatatatattttatatatatatatatatatatatatatggccaaccatatatctattagtagctctctctatatatgttttaaagccaggctggtcttaatcttgtctattgaattcattttgacaagaacagtgtaggatccattagtcctttacaatgaagaacatattaggtgagtcaatacttaattccaaaattttactttagaataagagggatgtctaacatcaattgattgaaggctggaggaaagagcgtggagagaaagaagtaacacactgctctgtgtttttgtgcctctgtctccagaataaaagtggacatgcccttcctcctccttacctctctctctctgtatccctttcagtacatatgtccaacactgccatacacagcctcgctgaaagtatcaggcaaagggagaaacagtgagcattcctacctccagccttgacaacaactatgaagtgtgttgctctaagctctgatcataagggaattagaagcactatgattttttaaaatcaaaatatgcctgtagctccaaaaaagaagaatttgactatagggtctcagctcactgctaggagaggtgtaactgattaaactctggtgcagaatgtatcaggatggaaggaatctgagaagtcaccaagttcaaatccttactttcagtccacagagtcatcctgctgcatttcctttttatgcctgcaaacaaaatgtttctggaactcatttattgtcagtgagtgctccctgggctctgaagcccagagatgttcctccataactcatcagaggcttgggtcatttctgagacaataagttactgctaggtcactgaacatacttggggtaggcagtggggaaggggattctgtgataagaaggtgatcatgtgttctctatttataggaaaatgaatcattctcagggtgatgagcatgtgtcattaaactgttttcctgatcatgaccttgcaccaagctgtttgccctctttgccctgttccctcaggctcagtggtcagggagggtgggccagctggccgagatgtgcagtccagtccagagttcaagaacagtttgaactgtgagactgagagccaagctgactaggtcagagtgagaagccattcctcagcatatgggagctgttagttagtgccctgaagctctctagttatttggggaaggaatgggagaaagcacttagatccctgctgggctcattacctttaattagcttgcttggtctggtggctactgcagagggggaaatctccaaaaactgcaaaaagattgtgcatgatggtgggggaagatactttaagaagggaagaagactctgttgagcttccacaaagaacaggttgttcatacctgaatgcacacagggaatgcacaaattttataaacaagaaggctgggtttgttttttttaagtttttctgtttttaaatttctgtttatttagcgggtacaagtgcagttttgttacatggatataactctggtctttcagtgtaaccatcactcaaatagtgtaccttgtacctattacgtaacttgtcattcctcaccctcctcccaccctcccatctttytgagtctccaatgtctattattccaccctctatgtccatgtgtactcattatttagttcttacttataagtaagaacatgcaatatttgactttctgtttctgagttatttcacttaagataatagccttcaggtccatccatgttgctgcaaaagacatgaattgattcttttgtatggctgagtagtattccatggtgtatatacgttacattttcttgattcaatcatccattgattgaatggtgtcctttgacttatcaaataaatggtgctaggaaaattggctagccatatgcagaacaatgaaactcgttcccctatctctcaccatatgcaaaaattcactcaagatgaattaaagatttaaatgtaatacctgacactataaaaatcctacaagaaaatttagaaaaaactcttctgggcattgcctagggaaggaattcattactaagaccccaaaagcaagcaaatgcaacaaaagcaaaaataggcaaatgggacttcattaaactaaaaggctttggcacagcaaaagatataatcaacaaagttaacactcaacatacaggatgggtgaaaatacttgcaaagtacacatccaatgaagggctgatatctagatatctagaacctatgaagctgtttttaagaacagaatgaggacatgagccaacacccaggattccagtggaaagtgaacagagcaggcacagttaatggaaaatgaacagagcaggtacagttaatggaaagtgaacagagcaggtacagttaacgtcatactttacctttttccatttgcacttcacgaagagatgagctttgatagttaacttctctctctttttctctctgttttcttcttgtgcaaactgggtgatgacattgactctcttcacaggaaagcactaagtgaggattaactaggtaatgagagcaaattggaagggtgatggagatgctccgcaaccttgctgatggatttctcccagcgagagaatctcttcaatgcatctttcatctgtgtcttacaggcagggtgtaccatcgttatctctgcattctgcttaagccatcccctccaaaccctgcctctaaggagctttggcctattccttgaaaggattcttcagttatcccaccaacaatcagaggcagcaggactcaatatccccctgtatggagaaaaactgagacaggagattgggctaagttgtcagtgattcacccccattcctgccctaaggaaaggatctttttctttccttttttttttttttttttttttgagacatggtctccttctgtcacctagactggagtgcagtggcatcatcatatctcactgcagcctctacctcccaggctcaggcagtcctcccaccttggcctcctgagtagctgggactacaggtacatgccaccatgcccagctaatttttgcattttttgtagagacagggtctcagcatgttccccaggctgggctcaagcgatctaccctgctcagcctcccaaagtgatgggattacaggtgtgagtcaccatggcaggccaaaagcatcttctcaaaaatctttcttccaaaatgtatattatacaaactttctggagaacaatttaggaaaataagtattcaaaattcttagaaaggtgcatgattcttgcccactgaattccactttcagcacatgaccattagtctttcatttcttcttctcttcttcacaccagagtgtattgccttcaacaaagaaactaaccacttttagacttgtaattaacctgtcccttcccctcatctgcccacctgactactgaaagtccccagagtctgcttcttagtgggacaccagccttctgcaaggcacttattctctggttatgaacctgtttaaggaaatctatatatttgcacagaaccatggaaatatagatgtgaacaggcttaagtgatcacaacccacattttttttttttttttgagatggagccttgctctgttgccaggctggagtgcagtggcgcaatctcggttcactgcaacctccacctcctgggttcaagcgattctcctgcctcagcctcccaagcagctaggactacaggcacgcaccaccatgcccagctaatttttgtgtttgtagtagagacagggtttcaccaagttgaccaggatggtctcgatctggtgacctcttgatctgcccacctcagccccccaaagtgctgagattactggcatgagccaccacgcccagccagcccacactttttatcagatgaggaactagagactctgagaagacaggtggcttatccaagagttcatacttattcaaggctacagaataaaccagaatctggggcctgtaactcccatatgggcccttctcgagttatggagacttaacggtgtgggacacaaaataggaagaagtagagtaaaactttataaagtaggaaaagaaataatgtttgtactatgtataatggcacttcaaaatccaccattaggagtgtctacagtttcctctgcataatttagaggctgaggccatgtacctcaattcagtccagttttctatccaagaggtgcaagctctaaaataaaggaaaggaatattctttatcagtcatcagcttaatctcaaaatattgtgtgctccataattgaccttcattagggcattatggacaggggcttactatatgctaagctatgtaaatacagatgctcctcagcttataatggggttgtctggataaatccattgtaagttgatccacacataaccctattaaaagtcaaagagcatactgaatgtgtwttgcatttgcaccattctaaaatcaatgtgtcccwtgtgtaaaatcagttgcatccgaaaagcctgaaacgtgtacatattctttgatctagccatcttattctaaaaatcaaaataaaatcaaaataaaatcaaaatataggtaagttgaactgtcataagttggggaccatgcgtactctgatagtcagtgttatgtatgaacttgaccaagccgcagggtcccagacatttgtccagccattaatcaggtgtgtctgtgggaatgtttctggatgagatgaacatttgaactggtagattgagaaaagcagattcgtctcccctatgtcagtggacctcatccaatcaagaccggaatagaacaaaaaggctgagtaagagggaactactcctgtctgactgctttgagctgggacatcaatcttctggccttcaagctcaaatgcaaatatcagctcttcttgagtcttgaggctactggttttcagactagaatttataccattggctctcctggttctcaggccttcagatttagactgaaactacactatcagcattcctgagtctccaaattgctgactgcagatcttatgactttccagtcattccattccttgtcataactctctttctctttctttctctctctctcctctctctctctctctctctctctacatatatatatatatatatatatatayatacatatatatatatatatatatatgaacagatacatcctattggttctgtttctctggagaaccctgactaatatacagttatgtgtcacttaacaataggatataytccaaaaatgtgtcattaggcaatttcatgatttgtgaatatcatagaatattcttacacaaacctggatggtttgctgcacacctaacctgatgcacactgaggctttatgggatagcttgttgctcccagactagaaacctgtacagcatattactgtactgaatactggaggcaatttctaacacaatgacaagtatttgtgtctctaaacatagaaaaacacagtaaaaatatggtattataatcttatgggaccagttgtatatgtggtgtgtcagtaaccaaaatgtcattatgcagcatatgactgtatatatacatttacacttaatcctcacaaaaaccctctgaaataggtactattgttttgattatcaacctaactttaaaactgggaaattatacatagactggttaagttcctcgcccaaagctacacactgcatctggaaggagtctgaattcacccagataccgcgtgctccatctgtttgattcacattctcctaattgtgtcccaaaagcctgaaacatgtgcatattctttgatctagccatcttatcctaagaatttaccctaagtaataatcatggatgtattcaaatatatcgcaaaacatttataacagtaaaaatatctaaacaacttaaatgctaaacaataataggcgattggttaaatgttctatgatgtagttactcagtgaaatactaccttcattacaaaccatgccctcaaggactatttatttacttgggtaatcattcaagctatatagatgagagtaaaaggcctgttacaagcctgaggagagatggtaactaaatatactgtatgctcgatgagaccctgaaattacattttaccatgtttccttaggcttgtagcattccatttttacttctattctgaagcagaaaaaggagattagataaaaactaagaaaaccttaataaaggccgggcgcagtggctcacgcctgtaatctcagcgctgggattacacacatccctgtttttaaaagtgaaatctgccttctatagaacacattcccccacagaaatatactacagaaaacagacctaataaagtggagttttgttcaaatgcttccctcacaatgatgctttaatttgctgaggaacatatgattgatcctagttcacctgctgaacatgcataggcagtgtgcatctctagcacactgattaaaatgaatacccagaggctcaacatgatttcttattaatcagaacatacacaactttgtgaaagggaccttagagccattctctgccccagggtgaactgggacacaggtatagaaacctccaggactctgttggaagagtttttcttctaggttttttttttttttctgttataactgtcctttccaagattaaatgatgcctaggatatcacatcgttcagaagaggttgaaagagggagttatttataaatcctgaaggttctaggaggtttgggcttagaccactttggactcagagaaggctgtgaggtaaggcatgttctaatcttgttgatggaagtcctaatgtgtcttagaagatttctggtcatcactgtctttagggactcagagtcttcctctaagttagtttcaggaccctttgaagtattggcattgctggctcagtccactggctctttggccttcacctgtctgcattatggttatagctgagatgccaggaaaaacacaagatgagtctgttcagctcgaagctgactcaactggtttctaccacctcaattcaaactaggaatgagatatttttcttcctttgctttttagggcaattaatgttcccacatatctccctttttcttgccatttcttarcatcctaaacactaattttgcaaaataatgttgtaaatgctttgcatagtcactatcttatgttgcccttcctgttcacaagacagccgtccgtgtcagttgaagatttctatagatatgcatcatctctgatagataaaggcatgtttcagagactatcctggtgggagtattttacttttgaaaccaactaaatctggttttgctcctgtttgtggtactttatttctccctgtagcaggagagtagtgccaacgtgcctggaaaatcaagtttcaaacctctattgcattttaagccatgttttagaatcttagggtcaattaatattagagttcgacaaaatctctgctctcaaacaaaattatatacaaaagctcagtaagtaaaccaggtaaatgttaaggtgcttcggttgaatctaggtttaggagtccagagaatctaactcaaacctggcagctggaggatacccaagaaactccctgggcttagtagtgtacagtgcgaaaaacagcgatctcatccatgtccttcattttagggagatgatacctaaactttgtgggttttatttcaaagtcacatgttaattagtggcattgtgagggaagcatttgaacaaaactccactttattagatctattttctgtagtgtatttctgtgggggaatgtgttctatagaaggcaggtttcacttttaaaaacagggatgtgtataatcccagcactttgggaggccgaggcaggtggatcacctgaggtcaggagttcaagaacagcctggccaacatgatgaaaccccgtctctattaaaaatacaaaaattagccaggtgtggtggcacgtgcctgtagtcccagctacttgggaggctgaggcaggagaattgcttgaacccggaggtggaggtttcagagcaagactctgtctcaaaaaaaaaaaaaaagaaagaaagaaaaagaaaaaggatgtgaaaggaaagagtttgcaaaaaaaaaaaatgcggcaatcacaatacatttatgtctattcatattatttgaatttgtcattttcttcagtgattttttttccttgggttgttcttatttctacatcattatgtttattatatgaaggaagcagtcagcctcatgtttattctctggtagagaagaggaaaacagtaatttttgagcatgaatgcataagaccatacagtttatggaaatggctgtagcttctctaacctttcccctttcatacayacttgtttccatgtacacttcattccccctttttccccctttaactctctttgtatttgtatccctccttccctatgccctttttactcaattcattccctacatcacaacctgtggtttttgtatctgatcatagttttcaccctattgaaaatcatggctggccaagtacatgttaacaggaaaattctggacagtccctttgtacacaaaccttactgcttagtttcatctgtgcagattgctgtatactcagccctgcagcagagagaccacactgcagcctttagtaggaaaaggataggaatgacaatacactgcagacacttycgtgagtaagttgctaaagcgtcagtaaaacatcatggtgaggcctctgcaatcagcctgcttagrtttaaatgacaattctgtcacttacaaatatataaccatttggatagttatgtttgcactttaagcctcatgttagttatctggaatagtatataatattacctacctttagtgtcatcataagaattaaatgatttttgtgatataaagtgttaagtgtggtgccagaccctggcaaagttggtaattgtccccttccttccttccccgctttcaccttccttcctccctccctccctcccttccttccttaattccttctgtccttccctcccttcctcctttcacctccttcccttccttccttctttccttctgtctctttcacatgccttctttctctcttcccttccttccttcccctcaccattctatgagggcataactgggagggttaatagaatggatatctaaagcagcgattctcgaatataggcttttaaccagcagaatcagcattacttgacccgaaaacttgttagaaatgcaaacacttaagtctcacccctaagctcctgattcagaaaatctagggttagggtttaactgtctgtgttttccttgtttttgtttgtttgtttgttttgycgttgttgtttgttttttgtkgttgttttgttttgtttttgagacagggtctggctgtgttgcccaggctagagttcagtggcacaatctcagctcactgcagcctcaacctcctgggctcaagcgatcctcctacaacagcctctgaagtcgttgggaccacaggtgcaccaccacgcttggctaatttttgtatttttggtagagacagggtttttccatgttgcccaggctggtcttgaactcctgagctcaagcaatcctcccaccttggcctcccaaagtgctgagatacaggcatgaagtcactgtgcttggcgttttaaccagcctgccagatgattctgaatttgaatatyctggtgagaggttttaaatcatgcaagtggctgtctgcctccagttaaggtaaaaagggaaaggcctcagcttacactgtggttgagccatatgacaggacatacaaacactattaatattactagagaagcaaccagcaccgttttgaatagctcagtctattgggggtgtgccttctactcaagatgtaaataaggataggaaaaatagcactagtatcaactgccatacaattatttagtcacccttgggtaactaaacagcataggtatgttgatcaaaatgcccttgagtaattgtcagtggaattttgaactctccccaattcaataagatactgctgcaggtattggtgaggtacagggagcatctaaatggactgtctttcattgtcttccttgaaggttctaaatctttgtttttctggagaatattataggatagaatgtatatcagaagtgagacttgggagacctgtgtgacctcccaagcatgacaatattcacagatattcagatccatagaacacttcangaaattgtctttatgttcaaagatctcatagaacatttagttggatacccttcccacacacatctctccatttgataaagagacactatcttttcaaactttctttttggtctttacaagaagaaccctgttaggatattctcaagatttgttctagtcacacgggggtgaaggggaagggggggtgtgttatagaagtagctctagatcatttagcttaagagttaaattttttgcaaaaatactttgtggtggatttctgatgccagtccgcataggacttttattatcgtaatagtgttttgtctttcttttttaagattaggaaagtatattcaccataatatttgttgttaatcacttattttttatgcacccttttccaaagcaactatattgtccttatcttgaaaaatgaaaataatagcttccagataaatccttatgatagttttgctatcactagatagtggcagagggaaacagaggaaaaggagatctatgcattgtctttgaaagtcaagattattatactaaatgtttttgaagcattttgaaaatacagcgatatttacttataattctcaactatattacagttactggatctaaatgagaagtttgttcatctgtaaagtatttgaatgctaatggtattcttctagtctagtgcattcaattaaaatataacgtgtgttacatatgaagttaaaaatgtttagtaaccaaattaaaaaggtaaagagaaataagtgaagttaattttaataatatattatctttaacctcttttaataatatactctctttaactctttaatatatttaataatatattctcttttatatacatagaacattgtcatttcaacatgtaatcaatataaaaaatatcaattagatattttacattctttttttcacattaagtctttgaaatttagcacgtattttacacttacagtacatcttaatttggactagatgcatttcaggttcccaatagccatatgtgtctattggcgttcgtatcatatttatcatggcagttttaaatgtattaaaatgataagtctataaggtatcttcttaagtaaattctcccaagtataacagatatcagaggtaatatacacctacaaataattattgctaaagtaaaatttgtaaagctattgactgtcagtaaatatgtttaagaaacagtttttcgtattactctaagattgttcttaaaaccagcattgcagttcagtagacaagtgcagatatttgaaataagatgtttttatactacctatgtttaaatttcatgagcttcatccagcactggattttctggattctgagatatgctattcacatttcaacatttatgaaaacagaatacatcttacaattaatgtgttcatttaatgtaatcatacttcttgttttcctgaaactgagttggaaatcatcatggaaaataggttcttctcaacacaggaagagttctcagctattgtatagttgtgtttttgagaacatgcttcagcacttgagagatggatttcctagagtttttcttaaggatcaaaattaaaaggtggaaatatacaaacgctaaataatggaattaagcattggccttggataacagaaggtgaaggagataagagacaactttctgttccagctccactttaaccacaggggacataaatatatgggaccttgtagtatttaaccttgttaatatctccatactgttttgcagtaggygttggaacagagcttcacatttttctggtggaggagccagtgatctctggatggtgaaaatattctctaaaacagactccacaactacaatgaccagtacaatgtgttttctatgccgctgtcctctgtcaaggggcatcacaagtggctggcctatattcatgtaaaggtagaactagamcccaatcaatgtgccctataaatacccaagtctttaaatacccttagataataaaggtaaaagatgcaagaaaaagaggactgggagagtggrccaagtttatagttctttcaaagtctatttgaattatttaaaaccattctttttttgttaatagattttaattctcatacatgtcacatgtttcttttgcagaattcaaaacatttttaaaaacacccatttcaataatattgcatgcaaggtaaacaagaggttagaataactagtacaacataacgcagcttgactagaatacctcgtcataacacaagtacatcttcttttacatttatgcaaagtgaaacattgtctgtctctctccatagtccagaaaaatctgtggggtaattgctcattgtcccttcacaccctgtttatattgcgcgtcttctattttaatagtcccaataaacagatggaaccacaaaaacacagccgggatggctcagttggtcaatggcatcagagaacttaaagtgcctgatgctgatgactcttccagaaggcaatcctcttatgagggtcagggtctagagagtccacgttgctgctcgtactctctgtgtttaattccagctaacatgacaaagtgcaagcgtatgacaaggactttcagtgtgaccatcagctggaagaagccaagtgcgtacagctcccggtggggtggcacatgctcctcttgtgacttaatggtggcttgtggctccacttcccttgggggttgtttttgttgttcttctctcaggaccacatttattttgatgttttaaaagagaaagaaaagttccaaaaacttcctttctcgtatttcctctttgagatccagcaaaatttctacaactggccttttccagatggcttgcccagaattgctgagagwttgaggcacctcaagctctgggctcaacatcgaaggttctttaaatgtgccttttatcctttagtttctgtcacttgatgatgggtgaccaccctcatctctctctctctctctctcttttttttttttcctactaaacatgagattactggaaatatttcatgattggatacatgctattggttaatccatttaaccaaactcccatcaatggatgtggagtgtttacaacatttttgctcttataacagtgcttgacaatgtagggatttgtcaggttttaatccaaatagggctttatgatacttgccattatactatcagatactttttcccactgatatggtttggctgtatgtctccacccaaatctcaccttgagttgtagtcctcataatccccatgtgtcaagggcgggaccaggttgaggtaattgaatcatgggagcagttttccctcatgctgttcctatgatagtgagtgagttctcaggagatctgatggttttataaggggcttcccccttcacttggcactcactctgtcctgccccttgtgaagagggtgcctgcttctcctttgccttctgccatgattgcaagtttcctaaggcctccccagcagtgtgaaactgtgagtcaattaaacctcttttctttataaattacccagtctcaggtatttcttcatagcagtgtgagaacagactartacactcatcttttgaatacattatgtgaagtacaacaattttttccaaaccaaaccagacctggctaaatcctttactatagaccccaagattgagagagagggaaaaaggaattgatctgaatcaaatttgctgttatcaagaagtagggtagggaagggaccaatatgagatgtacgaaaattggctcccaaagtacagaaaaataaagatttgacttgcctactcctggcataccatttgtaggttctggccaacatctgcccttctctgagcctggagcttctctctttcaaatgggagataattgctgggcagctagagctcacaggcacgccgcatgatgagtgaggtcatgttaataaagccctgggaaagaaaagcaatgtgaaacagcagggctattaccgttccaagacgattttatacaagtgaagcttaagttcagtgtgatgattaacaagctattagagccaagttattgattcctctatctttagagtagctaatgcagtgtgcaccaataggccacagaccccaagctttccttcttcctgtgctcctgttctttgtaatgatgctttccttaggaaaatgaaaatcacttcgcatacacagtgcaacatctttaaggcaggtgccagcagagaggaaaaacacctaagctgattttgtgtgtttttattattttttctgataataaagattaatgcagatacatgaaaaaaacaaaacataaaaagtaggaacagaaagtcaaatactgcatcttctcacttataaataggagctaaataatgtgtacagacaggcataacagaacggaacaatagacactggagacttggaagggtgggtgagtgagcagggttgagggatgaaaaattaccttagaggtacagtgtacattatgtggatgatgatttcactaaaaccccagacctcatcactatgcaatatatccacataacagaactgcacttatacccataaacttatatttaagaaaagaaatagaaaaaagataatttttttaaagtagaaagagggaaaaaagtaaagcatcatcccaatttctttcaccctgaagcagctagttttgctaatatgatcatatacctatccacacatatgtatatgatcatattaaacatattagtttataacttgttctttgttccttttctaacatactcctcacaaaataatatcattgatagtttcccatttcaattaaaacagatatcaatataatttatcagcaaaatattttatggatgtgtgtacagttttggttaatccatttaaccaaaatcctcttgatgaacacagagtatttacaacatttttgctctcataacaatgctctgatgaacctcatgcattcatctttgagcttttgaccaattttccttctgtggtaaattcctgaaagtagaattgttgggacaaaagatttagagattttgtatctttaaacatattaccagtttgccaacccaaagggtcatatgagattactttctgcctacagtgtagtaragtgccagcttctcccaacaaccttgccaacgttgggtattgtcaattttttggctctttgccaagctgataggagaatggaatgtctaatggtttttgaattacattctgactgtgctgcatcagactgtaactgaatgcagttgtgatgtatcaggggacctggtttaactcagcacactgtttgaatctgtgtaataactaactatgatataatcaggctttcttgcagttttgaaaaagaagccaaactttcacatggtttaaattactctctcatttacactctccatgtgtgagatcacctgggaagccctttggagatgcccccagtgacccagtacaagttgtcaactgcactccccatgaaagagagattgttctggtccaaaccctatgctctagaggagcatcttggaaacagcactgccctataattgatattgctccattgggtggcctgtggtattcaattcactggaaagtatcaatccctttgccttcagcaataatattttcacagttttgatgtgttttaaaggttattgtctccaggacaggtaattgaggaggcctcacacttcatcagaggccatttcatctttattacacagccacacacaaggcagcattttctcctttcactgatggattatttcaagatttataaggtctggtctacatgaaagcaaacacatgtttgggtacacagtcaaataattcaaagatatagggtcagcaggatcctaatattaaagtcaggacttccagcctgggcaacaaagtgaaatcttgtctctacaaaaaatacaaaaaattagccgggcatggtggctctcgccagtggtcccagctacccgagaagctaaggtgggaggattgcttgagccccaggaagtggaggctgcagtgagccatgttcatgccagtgcactccagtctgggccacaaagcaagaccttgtctcaaaaaatgataataataaataataaaagtcacaactttttcctcttctacctgtgccagagacccactacctaacccacatacacacagacacacacaaacacaccatacacttattcctttcttaaaatgtggctttcaaatatttgctttgcatgcagttttctctgaagatatgaccagtttcaagattatctactctaagttttctgactggttgtcagtcagtcagtttggaaccctgccataacatattttcctcaaattccttgcagatactggaataataatgaatgggaatgttattttgagccgatatttggaaagtccttatttggaattctacaagtttatgtctcctgcccagttcctaagccctctttctagataaccatccagaagataatcatccagcagctatccgggtacattcggctgacttggttagttgggtctaagcagtatatccatgagttctaactcgggtttctcaaactctttttcctttgggtttctcagactcttctctcaaactcaaactgccttctccagtccattgctaaagcttgtatgacctttgctttccctccatttcttgacttgtggcatccactagtcctacattgtaggactagtgtgagcaggtcactcagcctgaaagcactcaccctgggcctctagagctaagttgcctcaacacacttcactatggcttctcagagcacactcaccttgaatgtttagaaaaggtaatctttttggggttcaatgagatcaaaagcacggataccaattttgggatcaggaatcaggaaaatctgggaaatgaagaacgaaatgaggccttaccattttgatacaaagttcatattcaagtgagtcaggagatctggtttaagttccagatctgcctcttactagttttagaatcttgggcaattctaggctggacgtggtggctcacacccataatcccagcaatttgggaggccaaggcaggtgaatgcttgagcccagaagttcaagacatgccttggcaacataggaaggccccatttctacaaaaataaaaattagccaggcatggtggtgcattcctgtaatcccagcaatatggaaggtgggaagatcacttgagtccaagaggtcaaggctgcggtgagctatgatctgccactgcactccagcctgggtgagagtgagatcctctgttaaaacaaaacagaacaaaacaaacaacaaacaaacaaacaaaaaaacaaaaaaaattggagggaatttagttcatatatttgagtctttgtttcctcatctagaagatgtagtaaagataaatgaggtcatatatgattgtccctggcataatattttggtacttattgaaaagcagctattgttttaagtcctttgcatatacatttctatgatttactatatatcagtagcatttctccaacccatcttggctaggcaagcaccactgaatatgaaggaggccaaatagaatgatactatccaagctgcaaagaaacaaacaaaagaaaacatctaaatgcatgcctctttggartggcatttgcatccgttgccaatatccatagaacaaatgccttcaggcaggaagaagttgggataatgtcaatgtttttaatagctgtagtagagtcctatttagaaagcagtaattatctctccatattgattttttacatcccctcaataaatccagaagaaatgtgaagaccatctgtaagtgtgatttttaccaggatcagactctaatttgcaatggctatgtgtctgtttgatttagatcaggggttagcaaactgcagcccacaagccaaaactacctcccccatctatttttataaataaagttttattggaacacacccatcacacccatttctttatatctgtggctgctttcatgctaccatggttgttttatttaattgtaacagagatctaagagatctagagcccatattgcccacagagctgaaaacatatgtacatctaaccctttgcaggaaaaaacttgttaaatcatgattgagattatagtagtattatttctgattgactaggtagtaattggtcccagcatgtaaagtttctaatattaaagtcacacgatagaggagctagaggcttaagaaaagtrtacatgaatttatttatttggaataggaagggaaacatccctggtatcatcatgatggcatatagaggcagggctgagagctagaatacagaatacgtcctttgctagaaacagtttctcgggctgggttagagtgggtagaaactatggatcatcctgccgcaggtccaagtaaacaggatttggcgctctacataatggctataaagaaacataaaggtgatttctccaagtgttatgctaggtgagaaatatttaataagtaagagcaatcagaattggtcccatattgagaaagtctgttttggagcccagactaaatagactgtgcagtgagaaatgaaaggtcaatttaggtaacttcatttagggcaaaatcatgacttaggaaatcatgactagataaatatccagtgaagagcagggagagaagattcatcaatggccgtaggttgctgtgaactacagaactgaaacatcaatgtatgaataaagtgctgtattgatggacagatgtgtgcatttttatgtatatgccataaaaaatctgaatcaatttctatttgaaatagagaaaagctagttcagatgttagaaacttttctgacgcaaaatattgtgtaattcataaacaattccttgtgttttagtttacagtatgtccagaatataggacttgcctactgtaatgtataaaacaaaagaacttcaggttgatttatttgttaagtagtagacattctcctaggatgtttatgtttgtgaagatgataaatggaagaatacatccacagaaaatgtagacacaggcccttctctcccagtctcaacaccacaccctacacacacacaatgccttccttctaaccttgtctatactgtctctgcaacacacaaagcatatgcccaggataagcttctctttcaaccacctatcaggctttcaacatgtggtttgaaaagatagtgacattgctatgctctgacatacaccgtaatgtcagtacagcagaagcaagtggaagattctacttttccgataaagatcagttgctgtttcctgtcttgaagacgaaagttgagcaaaagcaaaggtcatctgtgtttatattaacaatgtaagagttatactacattttcgcaacaacatcaggtcattatttatccacttgtcctttttttttttatcattcctttgaactgcctgcatttgcttatcgtgatatttctcagtctgtaaacagcccgagtagctgttctatttctctaaatagagtcttaggtcattttattatccagaattgtaagtcatcagaatgcacccatctgttgtccttccacatctgggctaactttaactctttaagcccatagaaaaagtagaaaagccattgtgatatgagtttgatacttttttcctaccatactgctttccagcatatggttttccctgaaaaatcacaaggaaatatttacaaatatcttatttttctttggacatggcattaaacgtggtagatcctccatctccacttggctctttctgattttctgttaccctaattatccttcctgcgatcacagctgctcagagcctcttcttaccaatttaaaaaacctctaaagatgtgacggctgcctttccagtggccaacaagcagatttccatagcagaggagctgcgactggggcagagagccaaagacagcttgtgccaacagccttgtcaatatgccaatcatcttgttacagtttattacatgcgtgacttgattttcttgcatgtgcgttttagaggtaacaacatattggtaaacctgttttcaatccttttgattaccttcaatttgatagctccttcagtaatgaagaaaaaaatgggctattgtgtttgaattacatttatcaaatgattctaagattgttctaacgtgtgcgacaggataagctctcttttagtcaccaattggagaaatatgctcagtgtcaaggaaatggagaaatgcctcattatttatgttgactaatgtataaatacaatatgaacaggggcggtttcaaccctgcaaacgttttcttccaagttgctctgtattttagctagactagactagattgttcagtggtcacaaactaccccaaaatcttaacagtttacaacaacggaagtttattttctaaatatataacatccactgagtgttggccagcgttgactgggggttgttctccacatcacgtccctaagggaccaacagtgttggaggagtctctcttctcatattgatgttcaccatggcaaaggcaatgatcacagtgaaccacatgctacattttaagcttctacctggacaccacacaagtcacttccactcccakttcggtggtaaagcaagtcaattcaagtctgacttcagcatctttgggaaatataattccaccccrrgaggggaagcagatatgggtgaaatgtaataaaattcacctctcccataaagtcctagtagcattgttttatttgagtgaattcttttttttttttttcttccttacagatcctctttaaaacatcagcctggaaacagtatctgtagaaatcagttttgttagttctaaagcagggcttcattgttgggatgtgttgtctgccttcgttagcagatttcaatcatagccctaaatggaagacacattttagggctgttgctgctatagaactccaggtctttctgcttaacggtttcacacttacgtgtgaagggaggacacccttggccaaaagaaccaaggctgctcagttagctgctggttgtcctccagcaaattcctagaactaaatacctggtgctgaggtgtcacgactcagcaagtcctagaacctgtgcttatgacagcactctgataattcccggttattgcatcactccctgatggaaacccagcttttatttcagcaaaagtaatggattgttccagacccctgacctcccttgaagatgtctttttgttggatctggccctgtatattttccagttggttcaagacctagagaaatttctacagactctctcataccaggtaggtttttgtttgtttgtttgtttgttttgcttttgggataggacctagtcatattcagtccacattggaaagcataaattagtgtaacatacataagcttgttcattccactccatgtgttaggtttttgttagtgaacactgactgcaaaaataccaaggtatagccttatgcaagccaacatagtcacgttggacattagtgatctgagggtggaagtgaaatgaagtacggttttttttttccaagtcaactaaacgaacaggctgtatgttttacaatatgaattgggttgtgatatacaaagtgtttatccaaagttaccctcctctttgttttttagaatgacaagacccaaatgggagaattaggccagaagcaacaatgccctcaggcttagtgaaattgaccaaagtttgaaggtaagtgttttcagaccctggtttcctaggaccaagtcttggcctcatcaaacataatcacagtctccttttaccactttggcccaaacactatgaagccttttgcccactggctcagcttctcttgccatatactgattattaatgccagtaaaatacctaggcaccttggcagtaacttacgcaaatatgtatatttctaattacagggaaattgttagaacatgacttggattagagatacacagctaataattcaagaagaaataatgctttgttttcagtagaggaaaataaaagcttcatttgaataatttttcctcctttctctccctttttgttttgatacttacgcatgggcaataccgtaaactggcaataaaagaagttatcgcaaacagtgtggccatttctcctcagacactggacatcctacatctgttatatggtttaccatccatccacttccttgctatagctccaggtccacaattctttgtcatgtcattgctcttgacctataccatgactgataaccatgtacatttttaagaaaaaaatgtaaattaattaaaataatttaaaaacacatatccatatggtgtttgtgcatatattttgctttttctaatcttatctttgtagttcaaaaaggttaaacctgaatgtgatatgtgtgtgtatggaaactgaatgcactataggttcaaataggcaaggaagttgcttagtaacatcctgttcttgactgtgctatcataatttgcattttccaataaagtgtgtttccagccttaggacagtgctactattattgctggtggattttgtaatgtaagcttgactcattcagtgtcaagatcacctaaggccaaattcccattccacacgaattctctttcaagggatgtcctacccttcaagatgcccttaagaattctggattccttaaatatagaactatttatgcttactcataaaacagggaatgttataatatttctctgcttcactgtgtccaaggaagtagagaaatctggtaccatatttatgagcagcaataaaccatgtgttttgctttttcctaaaacaagcctggcaaactgtttaagaacacatgtgcagagcttgggcacagggtgagagtttggtggcacggagtgaggctagaggtgggcgtgtggagagtctgatatcctgatatcaaagcaattccattcagacttaggcctgagctgctcccagtcatccaagtcatttttactaatatctgacaacttgcaaatattgtgttacgttcaacactgaaaatgaggactgtgcatttccttttgtytaaatgatgattaaatggtgaagcagctacagaagtattgactaacgacagcatccatttactagaaaatatgtcatttgctactgcaaacatttatggtctgattatacctcatgttacactgcaatggtttgggttttttttttttttttgtatttttggtacatcagaaacacttttcccaatgtttgttagtttaagcattgktcaacatttatttattaagcattgactttataaaataggtaccaggaatatgaaaatgagtaagatatgttccctgacatccagtagctcatagtctagagatgtcaccataataataactagcatttattggacaccacctgtgtctcctgaagcctgttacctcatttaattttgacaaaaccttatgaagtgaatattatcacacaaacacacacatttagagaatgaatgtgaggctcagagaagttaaacacattgcccatgatcacagaaccagttagtggcagagttgggatttaagcccagatctttctgattctagagcgtatgttctatctatgaagctcttaccgattttattttatatcaagtgaactgtgtaatacataaagtcactcaggaaacagtactggatggggattatgatactaggcagtgcttactctagcaaataggtatcagagccctggcataggtcctcacttttgctaggattctgtcctactccacccttgctgataaacgggaagccacacgtcctggtccagcacttattctcaggcctcccagggacactcactctccatcacgtagtctcttccctaagtagtctgtgtttccctctgccttgcgggtaacttcatctgtgtgtaccaaacctgtcacccctcttagtagtcctcaaaagacaagacttcaagggagagttaatattctcagagttcatcagaaatacctgtttccaaggtcaagacccaccttagaaaggaggtcttcatataccctgtctgtgcttattttgtgttttcacaacacaaaatattttaacgatgatttaatttagttgtgtattgatagtctctgtcaatctctcagggttttttttttctgagggaaaaaattacattttgtaattttttaatttagaaacaacagcaataacaacttgagtcggtgacttctgaaccatttttgttctgattatcactgtaaacctaaatgtgtgaacactatcagtagggataatatttaccctatgggactgttaagcaatttaagatgagataagaaatgtcacagggaaaaggtgttactccacacatggtagtcgttattatttattgggttgaagtgttggcctcccaaagggcaatggtgatttaatagaatataagcaactaaatcccaggttaaagcagtgaattcctaattgtagaattttccctgttaaactatcaggtgggaaaggcctgtcaagatgtatatggaaggagtgagatccttgaaataattaatacacctggtataactcccatcattaggtaaacctgggctcatccctactagacagtaatagaaaattagaggataaaaggatagtcacaaaaataaatagaatatattgaaagctaactatgtactaaacagtgttctaggcatattttacatttattaattcatttaaacctctcaactccctataaagtagacattactaattatctcccttttacaaaaaaagaaatctgaacctaagagagtttaaaaaatttgcccaagaccacataatcagaaggaagattttgaatctgatttttcctcacagcaaagtccatgcattttccactttatcacaccggtttttgtttttgtttttgtattattatttttgagacagagtctcattctgtcacccaggctggagttcagtggctctcagctcactgcaacctccgcctcccaggttcaagcgattcttgtttctcaggctccagagtagctgggactacaggtgtgcacttgtattttttagtagagacagggtttccaccatgttgcccaggctggtctcgaactccttttactcaagcaatcctcctgcctcccaaagggctgggattacaggtgtgagccaccgcacccagccaatcacactgtatttaatatcacaacgaagtgcagtctgcccttctcaggatgatcttagatctatttttcagcaagtcgcattcgggtggagcaaaagcttttaaatggtggtcaattacacaatgattaaatttagtttaccattataggtcaaagggaagtgggaagagtttgatgactgtgtatttgtcatgtttctagttatagtgtacaactctgcctgtttatctgagtgagtgccaagaggtgaggtcagggcaggggctcttgcacatggcacatactatctgccccacagctattttgacttggacagtcattgtgctgggtggtaaaaattccagtgggctgggtaggacatactggggccctgtttcctctcatctgtgtttgagaactaggcagcattgcatcaaatggaaggaacaagtgatgagacatcaggaaaatatcagaatgaaagagaaatgcaaggctctaaaggaagttccaactcacttcgacaccctccagttagcaaagaggtgacagaatcccaaaagggcaggggagagattatggatagcaggctcctggaggaaaaactaggtatgtccagtagcagatctgtggaaactattagaaaccgagctaattgtggacttcttagcatgcctcaggaaatgggaaggaacttttcccttttgggcttgtattttttccaattttccttgttcgggaaataattaattctttaagcaatgtaacctcctgctgtgatttctcaattccacaaaagagaataattatagattaataatggaccaaaatagaaaaagctaaatgtgtgtagcagataagtaggaaatgttctgtcttgtaaagggtattgtttcggtgcccggcaacacagaaacaattctcatctatgcagctctaaatggatgttagaattcacccctctttcctactggtataaaattttcagtctcagtaggactaacgctttgacacatcctaaacctcaccaggagtaggaaatatttctcatagcataaatattttttcttccttgaactgaaaggtttgtggccttccccatgcatgataactgggcagttttcagaatatacctcacagtaaaacttagacttcacacctgtaatcccagtactttgggaggccttggtgggcggatcctgaggtcaggagatcaagactatcctggccaacatggtgaaaccccatctctactaaaaatacaaaaattagctgggcgtggtggcacgtgcctgtaatcccagctacttgggaggctaaggcaggagaatcacttgaaccagggagtcagagtttgcagtgagccaagatcacaccactgcaccccagcctggcgacagaatgagactccatctcaaaataaaataaaataaaataaaataaaataaaataaaataaaaaacttagacttcaagttttaactattgaaaaacttccatgaattgggtacagtaccgagctaaacgttgtatatatgttatttattcaggaaatattttcaggtactatgctgagtgctaaaagcattgttctgccttttaatactaacaatgcctgtgaaaaatatgtaggattatccagactttataaatttaaaacattaggattcagaaaagtaatatgcacatgctcctatactttacatgtgacagactggaatcaaatggtttaggatgccccgaataactgaactcttaatgccccagaagcccagatcgggacccaccactgggagttacagccctctggagccagcttcagaggtgcacaggtttattctcttccctattcaccagtgaaagaagcccagagcctccattccaggcactctgtgcttcccaaagtaacaattacttaatttgacaagataatttaaagagattgccaaaataacttacaggagattgccagtataatcagccctcccatatctggggattctacatttccagattcaaccagttgaagagagaaaatatttgaaaaaaaaaatttaaaataatacaaataaaaacaatacaacatagtatttatatcatattgggtattgtaagtaatgtagagaccatgtaaagtatatggaaggatgtgcataggttatatgcaaatatgctattttatgtcagggagttgagcatctgcagattttgatatggaggcaggggtcctggaaccaacatcccatggatacctgagggacaaatgtaatcaccatgttttcccaggtggatttttaacagtggccttctggagacactatgcctatggtttagtctaattgttaaaaattgggataggtgaagaaagatggcagataggcacaatgggaggcagatatttccataaatgccttttaaatcagatcctttctagattcacttttggctctggatctggaagctatcatcatggcaaccccagagtcccattggtttgcctattggttaggtgggccaaggtgtccacatatcacaaaagagttctcaaaaaatttcttcccaataacgagggagatttatatttaagagcacctttagccaaactgaaggaagggaaagttcacaaatatggtaatagctcaagtcaatgaattagaggctttgtgtagggtaattgttgagacctccccagttgactgaccaaaacaattctttgttggctagcagagttagagaatagaattttgcataatccaagtatttcatataggtcccttctgctgttactggagcactagtgagctattgtatttgtggtcataatattagctgcataggtagttctataaatgtgtctggttaataatccacaaacgtcagtgttttacatttgtaagtaaagaagtctctgtccacagcaaaaacgttaccaggcaatattttttagcattaaaaatataaaataaaatcaagttacttcaaagttctaaagaactagaagtcaataaaattcataaatatttatttttcaataattctggatgtatcttaggatcctaatataggatgtacatcctaatatagttatgtttacctgtcatttattttaattgatatatgccagtacttctatagtaagattttattggtaaaatgttttttattcttcaaaatgcagattcctttcatagggtatattcatctaccattttccattctttgaaatctgaaataagtcctaaccttatacattcaccaggagtgtgtattaatcacttctcacactgctgataaagacatacctgagactgggtaatttataaagaaaaagaggtttaatgaactcacagttccacatggctgggaagacctcacaagcatggtggnaaagtgacaggcacatcttacatggcascaggcaagagagaatgagagcaaagcaaaagggaaaacaccttataaagccatcagatctagtgagacttattcactaccacgagtattgtgttgagggaaaccacccccatgattcaactgtcttccaccaggtccytcctacaacacatgggaattatgggagctacaattcaagatgagattcagatgggaacacagccaaaccatatcagagtgtatactttcattttattcctcaatcttcattccttaagttttcaacaaataatttgcttttgaaaggattaggagcttaagttggctttatagttatccagtaaccttttgatttctccaaccaatgatttgtaaaggaatcttcagattcagatttatcctttcctacttcatcttcaattgctaaattaagcatgagtcccatcactgagataacagtctttcttggacagagttatgccaggtctttttctatgtaaagcagtcatctattaggctgtcgttggtctgtcaagatgaaactgtgtgcattggatccatgtgaatgaacatagaacattatacaaatattgtatgtttctattctttgcttgaagcttctggttacttagatcttatagtgcttcatagtataaaaaatggttaaaatacttaaaagttttaaagataaagatgtcagtgtcacagtgcataactgggttttacatggtcaagtatacacacatacacacacacacacacacacacaatttaaaaaatctctgatgcactatgccatactcagcaccaatccccattacaactctcccaatgtttcctggccaggcaggtcaccaagatgtttgggactgtttatgcctttgcacctactcatcataatattgtgtggggatcaatgggagagatatttggcccatttttaagccatatcaggggatcttccacttcctaaactcacttagacttggaatttaagtctagactattttgtttttaaccttgctaacacctacctacctacctacctattcattgtccatagcctaggtagtcttgaaaaaccctccattcccgcagcttcccccaatgcctcctctgaactcagtgtcactcctgtgtgcctcctttagtgttttttttgtttgtttgtttttgtttgtttgtttgtttttgtcattgcactcaccaccttatattgtaaaagtctattactaaggaagtattcctccctcctttatgtgcagaattccttgacagaaaggataggtcatgtttacctctgtcttgcctccaatgcgcagcatgaagcctggctctatgatcagctctaaagaaatgcttgttgatgggcaaataaactcgagaatctcacaccagagccagaccggaagtttccttcatttcatgactggttttcacaaaaacaagcattagggagagtggaaggaagagcttgcaaaataccttactactgcattatgaatgtggagttgtaattttgaggttcttatccatgaagatggtccttaaaattcagaattttaattaccaacataacaccatcctttcttactagtatcattattttatactatgttttcagtaggacatatctgatggaaatacatttcttttgatattatttattataactggtgagctacattccacccaatagtaaatgcctctcagcaaaaagatagatacttttgatagttaatatattcagatattatgttgtttgtggaaaccataacttaataaattttaaaacagtgtcttctttaaaartaattttttattaaactttgtattttgaggtaattgtagattcacatgcagctataagaaataatgcaaacaatactttttacccagtttcctccaatggtgacatcttgaaaactatcgcacaatagcacaactttgatattgacactgatacaatcaagatacagaacattttcatccaggcatcccctgtgcttagcccttttgtagctacgtctacttcctttgcccaccctcaccttaaaaccctgscaataattaacattttgtcatttcaagcatgttatataaatggaaccatagagtatataactttcaggtattggttttttccaatcagcataattctttggagattctttacttagcatacttctctggagatttatctaggtgcttgtgtactagtagttcattctttgttatcgctgcatagtatttcatgctagggatgttgagccatttacccattgaaagatacttgggttgtttctagtttggggagattataaataaagctgctataaatactcatacacagatttttgtgtaaacatacattttcatttctctgagataaatgcctaggaatgagtgtgatttctagatctgatagtaattgcatgtttagtgtttttaagaaaccaacaaaatattttccaaaattagatgtgccattttatattcctaccagcaatgtgacagcaattgtttttctgtatcttcaccagcatttggtggtgttactttttttattttagccattatgatcagtgcatagtgatagctcattttggttttactttgcatttctttagtggctaatgatgttgaacatcttttcataggcttatttgcatctgtatatcttctttagtgaaatgcttctctgttcctgttgcctattttctaattagattgttttttgactgttgagttttaagagttctgtatatattcttgatagcagtcctttgtcggatatgtgatttacaaatattttctcccagtccatagcttgtcttttttattctctttactgtttttttccacaaggcaagagcttttaattttgataaaaataactttttatacttaattggcaaccaaatacctaaatgtcttttgatagaaaaacttgtcctagataatgtaaaatcattttacatattcacagatccatctccactaatgtcatataagtttaaaaatcacaaagtaatttgaacagattcctaaattataaatyagttaacagttattttttgctctaatctttagttgtacatttacttcaaataaacatttgttaaaaacgtactctgtactgaggaatgaggatacaaaactcataatttgtcatttctttgcttcagggacttacattttactggattacatctaaatttttatttggcagttttattccaggaagatcatgacagtcttgttttctaaatcttaactgccttttgatgaaaaagaaagataaggctttaatttctctagtgaaacctgaagaagtaaaataaaataacttgtatgtcccttcacaagccacagtcagaacactgtcacaatctcgacctttgctccccaaaccctattttgcaaaccagatgctatttctttggacattacaggctattttcaaaatacatcagaacttaacaaaacatcatattagctaaatagcactataagaaactgcttataatattaaaattatgtcttgagtttataattatataaaaattgaatctaccctagagcaaaaattacaattaactactaaaaaatcgaataagtgatttttttttttttttttgaggcagggtctcactctatggcccaggctggagtacagtggtgtgatcatggcttactgcagccttgatcttctgggctcaagcaatcctcatcctcccacctcaacccctccagtagctgggaccacaggtgcaccccaccacacctggtatattagtttattttcacattgctgtaaagaactacctgagcatgtgtaatttattaggaaagcaggttaaattgattcagagttcctcctggctggggaggcctcaggaaacttacaatcatggcggaagacaaacaggatgcaaaacacctcttacaaggtggcaggagagagagagagtgagaggggaactgtcacacacttttaaaccatcagatctcgagataactcactgtcatgataatagcaagggggaagtctgcccccatcattcaatcatctcccaccaggcacctcccctgacatgtggggactacaattctagatgaggtttggttgtggacacagagtcaaaccatagcacccggctaattttcttttcttttctttttggtagatatggagtgtcactatgttttgtttccctagctggtcttgaactcctgggctcaagtgatctgcccacctcggcctcccaaaatgctgggattacaggtgtgagccagtacacccagccaagaagtgatttgtataatggcaggattatgaatgattatttctgtgtctttaatttgatcatatttttaaaacagtcattatttttggtcatcatgctatatactacagagagcagtttttaatctgtgaacgtgtaagtcaacttgatttagctgaacatagcagagtcatcaatcaaactgattgatgactaagggtccgcagggtaacacatcatcatagttgtttccatggtgatgaattatgatgtcacaaactcatcaagactgtgactcagtgaaccatctagacagaggatgaaatgcagtagttcaccaacatgtatgccatctttgtattatatggtattattaattaaaacgaagggctgagtatttctttcattgagattacatgaagatattacgtatattcagacttgcctgaacacggctatgctggttttaaattgaaggttttcacaaagcaaaaaattgagaaacagaatttgacatagaattgtgtatttattagaaaagatcttttcttctcatattctgaaaagcacactcattaattacagttaaattcaggcaaatttggcaaattttcgtcagtatacttattcttttgttagttaatagctttgcttttcagttttagatattggtattaaatatataaagagaaaagaccttagtgttctcatgctcagagattaagagaatagttataggtttgaaattaggcactttccctgatagtttttgttggtacatgttttaggttatgtttctatgaacaaccagatgcaaacgtcctggcattcatcctgcctgcttgctgtttgtaccatctccgtggtagcaaccatccaagctgctggaagcacagactgagctctatgagtcaattattttatatacctgggaacgtgctagccttcctgtcactctttgatgtcactatgtagacagtttgcagcctaggcaacatggtaagaccctgtctccaaaacttccaaaaattagccaccaggtgtggtggtgcatgcctgtagtcctagctactctgaaggttgaggcaaaaggaaccctcaaccccaggagtttgaggctgcagtgagctatgatcgcaccactgcactccagtctgggagacatagtgagatgctgtctttaaaataataataataattttaaaaattaaaaaatatctagacaatttctctgctttcaagactcttcaaagatctcaaagagaagctttactctggagtctcaacagaggccattcaaaaactcaacctggtttttcaacaataaattagaaatgtaatgctaacagtaggtgccaaggccgaacatcagggaaaagacattagtgaccttgagttctagactagattttaccagtttctgaccttcaactctggtactcgattttctcataaatgtgagaaaatatcttaaccgtatcacagaattgatgtgagaattcaaaataaagcatatttaaagctcctaggttagtgcttcatttatgaaggtcagtgcttcataaatgatagttatttttttccattcaaaatagagataaaaaagactttatctcactaatgtgtcatgcaaataaggattaatcctgttttctattcctgaagcatacagaatgtgatttctttctccatcatttccatctgactatcatctgggagaacacacagctgctccacatctggtgcaacacaggcagatgtagctgtccagagggagaagagtgtttgcttttctccacctaaacactgaccctcttctgcttagattcaaagactgtcttccttctgcaggtttacctgagcctggactcaaagaattaccttcattatgagctaaaggaagtcaggcccattcttcttctgcctggcccctctggctctttggcacttcccacatcctcctcatttggaaaggcttcatgactttctggttcacaaagcagctctgttgttgcttatttccactacagggaaaaagtgaaacacttcactcagggcgcagaacaatggaagtccctggaaggaaaggcttgcaagagaaaaccaagtggcttctgagatattcgaaagtccagttgttttccctttttaaaaattttcagatgctctttgatgccatttcataaagcctgtgattgggccaaaagtcttagttcaccatgtaccacaaatagtgtactctatatagcatatgcttaactaagaaaaaataaagatttagaaatagatgtattgaggacatgccattaaaagcagcttccattgaatcaactgtttttcagagtactgtcaagattaccttaaactagtctaatcaaggtaggtggtggattccaaacttgggaaaaagtgagtctttgtattctgtgaagtttaataactacccaaggaagaagtgttggatacaacaactatgagtatcttagaaagtatgtcttttttttttttctgagtcagggtcttgctctatcacccaggctggagtgcagtgatgtgattataactcattgcattgcaatcttgaccccctgggctcaagccatccttccatcttagcctcccaagtagctaggactacaagtggatgccaccatgcccagctaatttttttcttaatttcatttttgtagagataggatttcccaggctggtatcaaactctcaaacttcctggtctcaagcagttctcccaccttggcttcccaaagtgctggcattataggcatgagccaccacacccagcctgggtgtctgtctttatgctaaatgtccgagcctttccatttgtcttttgcctcttcataaacctctgctgagctttatcaggtcattcacatctttcattacaggcaagtggtaaacttagtaatatgcttcctctggtgacaatgggcaaaggactagaagcataagtaaagaaatagtagactgaaataagcggattttgacatgcaaaaagatgcagcaaggtgaacctggttaagaaatagactcagagagcttgaacatggaaggatgctaggacaagtggcagctaaggcagaaagacagccatggttccagatgtctggggaaacaatggaaggcagatattacaaagttttccattttgtaccagaagtgtccgtatgaacacaaactcctagtaagtgttcttaattgttctgtgggctgatgtgcatttttctcctacaataggaactagcaatctacatattatttaccaagccttcctagatagaagcatttatgattattttttgtttatataaatgtcttgcatttactagaaaatcatgcttttcgagaacgcatttctattatggagtttcttaaagagagaaaaaaaaaatgtatggctttagaaaaatcctagtgattttttgacagtatgaactgtattgtgtgttcttgtcttggatcaatatcatggcacaatgctttgatagtgtctgaagattaagatatacaatacaatttcctcccttcccttctttcctttttccttccttcctttttcctttctttcttttccttccttccttcctttctttttctttctctctctctttctcttccctccctccctccctctctctttcctctttctttctgtctgtctgtctgtctgtctttttcttgagatagggtctcactttgtcacccaggcagaagggcagtggccctatcatatttcactgccacctcaaattcctgggctcaagggatcctcccgcctcagcctctcaagcagctgggactacaggtgtgcccctccatgtgcggttaattgtagttttttgtttggggtggttttgtttgtttgtttgtttttgtagagactttgttgcctaggctggtctcaaactcctgggctcaagcagtcctcccactgcaacctcccaaagtgctgggattataggtgtgagccaccatgtccagcccaataccattttcttatgtttcccatatatgcataattttacttgcatgcaattctgaatggatgaaacatgttttaatcacctatttttctactttgtagaagagccaaggtaacatgaactaaatcattaaagcagttgacttgttagtggattgtgataggactcaggcatttcccaaagggggaacccatattttggtaatcccagacattttaattatatttttctatccattcctcaatgccacaatgaggaacagcattctttcctgggaagtctcacaattttgtcaaaagtagaagagttgcctttgacgaatacaaatccagcaataaagaagaacaggtctaacaaatgaggccaccttggaaaatgtcattttgcccctttgagccttgcccatcttacctttagaggaagagatgggactgaatcagttcaaagagcctcgatagctttaaatgtctgtgattgatttttctgcagagcaagatcaaacaaaacagtatttcctagctgctgcccttacatgtagtggtgattcacagagaatttggggaggaaagtagccattatgggatgttttgcaaaaggcaataccaagattgatcatcacctgagggcgayacactatagttgttcctctgtatccatgacagattagtcccaggaccccttgcagataccaaaatccacagatgctcatgtcctgcttataaaatggcatagtatttgtacacagccttgtatatcctcctgaatactttaaatcatctctagattacttataatacctagagttgtataaatgctatagaaagtattgttatactgtatttttaaatgtacattagttttattttttttccgaatacctttttatccatggttggttgaatccacggatgcagaacccatggatatggagagctgactgtaatagtcaaagacaagagtggctggtggtaagcacactatctgtccacaagtgaatttcccctaagaatcctgctggtacatttcttcatttcttgagattattgaaccacgtgatttgcctcactgcttatttcaccttctgggtgacatgggctgtgaatgtgcagttcaaggcctaaatattagccctgattcaaaatggacattaaccaaaaaaacaaacaacaatgatactggccaactgacttctctcacttctctcttctcttttctttaattcattccttacctatttagaatagctgaggctcatttttatcttcttatgacagccagaattgtcatctattaagattaagtaaggaaggcataattgatattcacaaaccaccccaggatttatcagaagtgagggwgtttcatatggattactaattgtctaaaatttggctctaagcacctgaagatcactaggcaggagagaagagtagggtttgttgtacatgagaagaggctgtggggtgggggatgttcaccgagaagactgctttggtctttgatactagcatttttccttctatatggttaacaaggcacatattttcatttttatatccccagaataaaggcttgaaaggaaacaaaatctcaaataaatggactaatttgttaaattctggactaaacctcagtttattttaacagctttaacaackgtctctggagctcataacacatatagagcactattggtgtcacacaaaaccttgaaatcagaattgccacagaccgaatctgatctgaaatggcatttcattcaactgcagctttgtgtcacaagaacctgtctctgttttcctaacatgggtatgatgcatattcagaagcagccgagtgatttacttcttttttcattacgcttgtggatttgcatagattcagaaggggcatcttctgggaggtataagagtttatagaaagactaatttcttgactaggcacgatggctcatgcttgtaatctcagcactttgggaggccaaggtgggaagatcacttgagaccaggagtttgagaccagcctggccaatatggtgaaaccctgtctctacaaaaaatacaaaaattagctgggcgtggtggtacatgcctgtaatcccagctactcaggaagctaaggcacaataattgcttgaaccagagaagtggagattgcagtgagccaagattgtgcccctgcactccaacctgggcaacagagtgagactctgtctcaaaaacaaaaaaaaaaaaggaagattgatttcctgtagacagaaggagtgtttatattggcagcagcaatgcagtatcaaaactttggggtcaccctcttgaatatcttatttgtatttcttcttgggttactaaagtcttgaggagaaaaatgaataaaaggcttaagaggattctcatttccatgcaaagcttctccacactcctgagagaaggttagggtcaggaaggaaggtcagacaatataaacctcagcactattcagtaaaatagccatggggaaaaatatggtaagtttgtcttaattcatacccaaggacatttagcgctcagaaaactaaaatactttttatttatttatttatttatttatttatttatttatttattttgagacagagtcttgcactattgtgcgggctggagtgcagtggcgcagtctcagctcactgcaacctccacttgaacctccaggttcaagtgattctccttgcctcagcctcccacgtagctgggattacaggcgcccaccaccacacccggctaattttttttttgtatttttagtagagacggggtttcactatgttggccaggctggtcttgaactcctgacctcgtgatccacctgcatcggcctcccaaagtgctgggattataggcataagccaccttgcttggccctaaaatacttttaataagattgtctcatccttctcttggttttccaatggaaatggtggtatagcaagtccatctgaaacacttctgcaaaataacaatgaagctaatcacygtgggaaacatttacatcatatgtatttgcatacagaggaaattgataatcttgagacatcagcatactagaatagcaagagacatgttttattctattatattctcttagtcagcaatktttaattgttgcttaaaggaaactgaataaaacgtgggcgcagtggctcycacctctaatcccagcactttgggaagttgaggagagaggatcgcttcagcccaagagtttgagaccagcataggcaacatagtgagaccccatctctacaaaaaatattttttaaaattagtcgagcatggcggtggctccctgtagttccagctacatggagggctgaggtgggaggatcacttgaaccagggaggtcaaggctgcaccctggcctgggcaacaaagccaaaccctgtgtcaaaaaaaaaaaaaaaatacgtaaagcaacagtttttctataacggattgcatggtaaaaggaaggatgactttcttactataactccttatgataattttttccaaagtgttaatcttaggggttgaaatttttataggtaatcattaactttagtagaacattattttaaagtttaggtatttcatctgagtatattactctggctttcctaagctagcttagttatatatgttcacttcagtttgagtctccactaaattttaacatgaacaaaatattatatgcaacaccatagaagcaattgttaaatcattgttacttttaatatcacctaaatctaacctaagtaaatgygtttatttttattaccaactgatgtagatatacccacatggacagaaaacagcataaaccaccaaaaggacttgaaaattccctcttcaagacttcttttgccaatgactaatgtttaatgctatttgctagagattctggtgccaggaggatttctaaccaggttattttatcaataggaataaaatatcgagggcttaaattagtgtaatctctcaagatcttgaatttgacrttttcataatttttacttaatcatagctcctggggattggaattactcttttagctggcccgagtctgggaggaggatccaaagtctttgagttgttttcttttatttctttttagcccctaaagcactggaaatggttggccctgaagtgctcctaaggtaaccgcaagatgaggcaaaacaggattgagatgaaaaccaagctcacccacatcctacgtcaattagctatttttttttctgtgtaaacaatgggagggaggtggattgtagcttttatggtagaggttcctcggcacctcctgacgcccccaggggtcccccctgccactgccctcagcccaaatataagctgacaacaaaatgtttcttcaaagtgctcattgtttactctattctggcttcttcttaaaggtcatcatcatgttgaattatcttgagaaaatcctctgaagtgtatgtgtgtgtgtgtgtttaggaaggatgtgaggaggattgggaggtgagtctctgaataacaagttgaaaaaagagtatggaggaaagcggtgtttaaaattgtccaaagccatcggccgggcatgatggctcacgcctctaatcccaacgatttgagaggctgaggtgggaaaattgcttgagcccaggagtttgagaccagtctgggcaacatggtgaaaccccatctctacaaaaaaagtacaacaattagctgggcatggtggtgcatgcctgcagtcccagatactcaggaggctgagatgggaggatcacttgagcctaggagtttagggctgcaatgagatgtgagtgcaccaccatactctagcctgggcaacagagcaagaccttgtctcaaataataataataatatataaataaacaaataaataaaattatcctaagtgaaatcagttgttgatagaactgaagtacatcaagcctagtgggactgtggttgtctctccagcctaaaaaaaaaaaagaacaaaaacaacaacaaaaaaacttaactccaaaattgctgytgctccatttatttcaggtgtaagacttctttgagatttaaaaacaatataatcatttacaatgtactttgttggacctaagcataggaaaattcattcattcattcattcattgagtacctgttatatgccaggcaatgcactaggcaccatcaaagatgaataagctatgtgctaaaattcacagtctaacagaagaaacatgaaagcagagtggaaatatactgtggcaatacatatttggatatactggtattaaaaagtaaggatgtttcagctaaatcttttttggtgtttattttttaaaaattcatctattaacttcctacacaccatgcatatattcagctaaatcttaaagtatgagaagaaacatgccattcatgaaagggaagagggagccagtgcatcagatacaacctatgcaatcgtgaagatttatggcagagcacaggatatttggggattggcaggcatttcaaaatggctggcacataaagttccgggatgggaacaggctggcaagagaagagatcatcggagccaaagtaactgaactgtgattgaattttagatatgataatatctataggaaacctggcaacccggtgggcaggtaaatatgatagagcgaagatagaatcttcaggccttcaggggactaagcaggaatagaataattttattgagcactttaagtggacattatgctagattattttacatatttcatctcctttaatttacaccacaaccctgtgagtgcaggttgataaagaattaaataaaatccaggtgaagtagcagcacctatagttccagctacttgggaggctgaggtgagaccattacttgaggccaagagttccaggctgtagttcacaatggttgtgtctgtgaatagccactgcactcctgcctgggtgacacagtgagacctcatttctaaaaaagaaaaaaaaaattgagacagggtctcgctctgccacccaggctggagtacagtcacgcaattacagcttactgcagccttaacccccaggctcaaacaatcctcccacctcagcctcccaaatagcttggactacaggtacatgtcaccacacctggctattttttgtattttttgtagagatggagtttcaccatgttgcccaggctggtcttgaactcctaggctcaaatgatcctcctgcttccaccttccaaagcgctgagattatagacgtgaaccactgcacctggtctagaaattatttaataataaaaaaatgaagacagaattcaatgaagagcrtagaagagtctcttaaacctytgttttaagctatgagccaggaaagagatggtggcaagggtgagatggttgcagtgcttttttgttcacttatctcaggcctgtgtgttctgagttaaagacaagtcagttggcaagagaaggagagaggaagcttcccagaaccatttgaaggaaaatttggaaagtcttctctaagggagttgccctcaactaccttttaacacaaatggaggactgaaaaacaaaacaaaacaaaacaaacaggaaggaattgcagatatacagatctttggcctttcaaactatggtatctcttagtactattttatatattgataataattataatttttctcaaacttcccaaaagtggaacattgtgggaaataatatgggagtggacatttgaatttctgtttgactttgcagcagaaatctcttttctaactctctctttcaatctcaccatcagagccatctgattgcttgataacatgattctttttgcccagcccttgttatcctccctcctgccctagtmaccatgacataggctccactcatttctacctaggaacctggatgcactgctttgcactattgcctcctggcaaaacagggcaatgagaaaggaaatggaagcccaaattcagagccctccttcccagcacaagaatgaggagatgccctttttccccggggagggggattcttccctctctcttcagtaattgtctttatcactgtcatgttctagccagtctttattatccccgccacacaaatttcatgttcttctggcagtcaaatcaggaaattcaaggacacaactgctctggcttcgtaaagatggggatcaaattgtttgagttgctgatagcaactctttgcttcttgattctccatgcctcctcaagcttttttggctgaacttttagccttggaacagggtcactggaaaatacttcttaatatccttaaattctaattctaatatttgccttgtttcattttgtttatttggggaggataaagtttaggtgttcacctatcaaactcacttccttcttttttttagacaaggtcttgctctgtcgcccaggctacagtgcagtggtatgatgttggctcactgcagcctccacctcccaggttcaagtgattctcccacctcagcctcccatgtagcagggatcacaggctcgtgctaccacgccccactacttttttgtattttttggtagagacggagtttcatcatgttggccaggctgatcttgaactcctgacctcaagtgatctgcctgcctcgacctcccaaagtgctgggattgcaggtgtgagccaccgtgcccagccctaacttccttctgatcaagtcattctcaaaaataaacatttaattgactgtcaactacaatgataataagacaatgtttgccttaaatgagctctaaatctagttgaagggataacacatggaatggactggtaataaaaagtgggctttgcttggtgctacagttgtgatgtgaactaaagagggagtgttttggactgactttgagttggggaggctttatggaggaggtgacttttcagttgggccttacgttgtattttatgaaataaaaaaagaggaaagacagtccaagatgagaagacagtataaataaagggacagaggcatggaagggaatttcttggccaaaggatagtaaaaagtacagaaccactaaagtctagagcacataggctagaggctagaataagtgagaaatagctaatcctaggaagataaattggggcttaattgtaaaaacctttgcatgctatactaagaagctttgagttcattctcttggcaactatgagccattacatgtttcaaaagatagatctgatggaaaaacagaagtatagagggtaggtaatattctaatgtgtaaacttctactgtgagtccaaaagaatatggtatctatctctgaaccatgttcaatattttgcttagactgttcgaactatgtaagaataagaaatactaaagtgttttttctctgatataatatttaaataccttttagctatcaattccttctaatttccctttaataagacatttactacaaatagacatcattcccatagcaatcttttcttgagacaaagaggtcagtaggccaggttctgcatagaatataagctatttttccattttagaatgccactctccattgatgtctactctcgttaagtagaaaattccaagaagtactaacaaaattatgttaatttgtgtatgtactgacttccagacatttggaaccagattctgaacctgtaactcatttaaatcttgccgtgactttggtttcccaagttctaggtctttctctgaaaatttaaaatgcttctggaaagatattttccatgacacttttgccttaggaaaaaaatttttggtcaacattggaagaaaaaaaaactgagacaacatatatcttgctccttaacatattctgtatgaaattaaggtcttattgacaatctacgtatcagagcctcgtacacaggagctattgaaatgatgtgtcagttcagaaaatcatgttcattatttctgattctcatcataaacaagcagtaaatcaccgtataaggggtgtatgcattagggcctcccacataaacttcacctctgcgtgtgtaaacattttcttattatcgcaaataatcaacaggagaagagcaaatgcaagtttagcttttctccagaatgtttatcatggttactttaaactgtttataggaaagagtgaactataaatgtctttcaggaggtgggtaggaccatatggctcagaggcttttctgcagtaaaatgtttggttaaattttaggcaacagacagtccttccacagcaattatttgtgatttcgagcatcgttgttgatactcaactcctgaaacaaataacaccgacctaaaacatttataataactgaagaaaccaggttccttttaaccctgctaggatccagctgcccccttgcaacccatccccagtcagctgcagctcaggcaagcccagcctttccatccctgcacatcagactgtggtgcagagaaactccctgtgttcttcaaaacaaacattggatgtaatccacctcaatcttttccatggtgaggctttacaaattttagttttctctaagaagatagcctgtatattcaattgcctgggtaaaagtttaatttctgatgcgtaaagcatatcctgccttgaaaaatatctcaggaaaaataaaggccacaacagtttcatgtgtgcctatatcaggattgctgctgagtaagttgtgaaatgtttttggatttctgagccatttggatttcagaattgtggaggaattctggatctgtattttattgtgtattaccaattattttcctttctcttttatgtgacgggtagtattttgattatttaaaatcatctttgtagaaaaattattggcagctatgaatttcatttcaagatatttaagatgccttagaaacttttctaaaaacagtataataggattgagaaccactcatgtatggcctttactgtttcgaggtttttcttttttgacatgtattatttgatgaaaccctatgagattaggtctttacttccgaaagaagaaaaccaaattcaagggcaattaaaaacttgtcaaatgtctcaattttagtaagaaaaaaaaccgacattggcctagatcttaatctgtgcccagtcctcttcccatccctctttttttttttttttttttttttttggkgggctgctctcaaatttttgggctcaaatgaacctcctaccttggcctcccaacgtgctgagattacaggcatgagccaccgtgcctggccagctaaggttaatttagtattgaaraaatatttttgttatgaatttagtgtagccaagtgtgcagtgtttaraccatctacagtaatgcacattaatggcctaggccttcacattcactcaccactcactcactgactcacccagagcaatgtctagtcctgcaagctccattcatgggaaaggcctcacacatgtataacatttttttgtcttttattctgtatttttctatgtttagataagtttagatgtataaatacttatccttgtattacggttctctagtgctcagtacagtgacttgctgtacaggtttgtagcctaggaacgataggttataccatatagccaaggtgtgtagtaagctgtaccatcttggttcgtgtaaggacattcagtgatgaaattgcctactgacacatttctcagaaggtacccccatcgttaagcaaccattactgtattagaaagcagaaaaacaaattcagctccggacttagcctacccatatagcatcattggccagaagaaaatcactttgctttatgaatcccagttttctgcgggaatgaaatgaggtaccatacgtgatcctaccagcataacacctgccaaatagtgcacattcaatactaaaccatcctttttatgcctataaataaaggatttgtactatatcaagagcttctctatgtctgaagttacaatagagtaattccaaattatctttcatggaatcaaatccctgatgatcccttgattttctgagttctgtgaatttcatcacagcccaatttgacccattactgctaattcagtgtttttattagtaaattatatttccaagttgaatcaaaacaacagtatagcaggcacagcttaagacacaagataaataagttgttgcattcaccagtcaaaatatttttaaaaaatcaagaagcaatcactgaatagttttccttgatttagataccaattaggtttaatgaccaaatgagactgataatcagagctgaggaactcaatcaacaggattgcaacatgctttttttaaacctcttgaaagatcacatcactacagaataaggaaacctatttatttatttaatttgagacagtctctctctgtcacccaagctggagtgcagtggaatgatctcagctcactgcggcctccaccccagttcaagcaatttcatgctcagcctctgaatgtaagctgggactacaggggcacaccaccacgcccagctaatttttttgtatttttagcagagacaggttttcaccatggtggccacgatggtctggaactcttgacttcaagtgatctacccacttggtctcctgagggaaatctatttatgactaatgctgttctttttactaattgtttcattggctgtcagcccttagaggaaaaactgttcaaacaaccttttattcatagacccatgttatttaattttagaattatttcccatgtatgcacaaccgaattttcattttcataacaagaaaacaaattctttaagtgagaaacagtacattttacacccttccttttcacaaaaatctcacagtattttctgacttatggtcttgataattagcactcctgtttgctcgtgttctctttctttcacaagcaatgtgatcttatttttaaaaaggacctgagacaagtagacaattgacccttgaacaacacagatttgaaaagttttggtccacctatacacggattttctcccacctctgccacccatgagagagcaagaccaagccctcctccataccctactccatctgaagatgaccagggtaaagacctttatggggattcacttccacttaattattagtaaatatcttttctcttccttatgattttctcaataagtttcctttatctagcttactttactgtaagaatacggtatagactacatataacacacaaactatgcattatcaactatttatgctgctggtaaggcttctagtcaacagtaggttattaatagctaaattctgggggagtcaaaaggtatatgcagattttcacgggtggttggacccccccagcatccatgttgttcaagggtcaactgtatatcctaattgttatttgacactggaagaaattagatctcctggccgggcgtagactcacgtctatcatcccagcactttgggaggccgaggagggtggatcacctgagatcatgagttcgagaccagcctggccaacatggtgaaaccccaactctactaaaaatacaaaaattagctgggcgtggtggtgggtgcctgtagtcccagctactcaagaggttgaggcaggagaatcacttgaaccctggaggcagagattgcagtgagatgagattgtgccattgcactccagcctaagtgacggagtgagactttctcaaaaaaataaataaataaataaataaattatatctcctcttagaagtttgtccctctcttcaactgaaatctatcacagttcgacctacatggtagttgcattgatctgtccatcctggtgccacatatagaacatctactttgtcagatactgttccacatacagtaagcagaacacatgatcccagtccacatgaaggatggtgtccagtcatgtatggcctgattcttttctgtaaagtgctttcacatttgtagttggttcctttcctagagcactcctgtttttgcattcttgtagaaagcaaattatttccaccctgtcactgatttttttctccaattcaaacaatacgaactagaaaagagaactcccttgtaatataaaaggaaatagaaatccctatgtattcaatgtttttaaagtttaatatgattcctcttagcaataaccagcaaaaagaaaatgtttctactttaatcttttcttttgaactgaagtgttcctctatgtcatttacatgacaattggcccaaatctctctgttaccaggacttggtattcaaagtaagaggcttcattaaatttcaagaggacttttttggggaaagtttttgtttgttttgttgtgttttatcataacaaaacaaggcatagtgaccaggaagatggagtttctagttagtgcatacatatacatgcttatggttacttaatgtgatagaagcaaattattcagatgcctcttctccacagaaggttttggtcttcagcacgtaaagcaacttttttttttttgtttttttgagatagagtctcactctgtcaccaggctggagtgcaatggtgcgatctcggctccctgcaaactctgcatccggaattcaagcgattctcctgtctcagcctcctaaatagctgggactacaggcacgcaccaccacgtccagctaatttttgtatttttagtagagacggggtttcactatgttggccaggatggtctcgatctcttgacttcgtgatcctcccgcctyggcctcccaaagtgttgggattacaggcatgagccactgtgcccggcctcatgtagagcactttaaaagtacattggatccatagtaatcacttaactatgaacttgtatatccatatcaaaacttcatgttgtacagcttaaatatagacaataagaataaaataaataaatgaaaatattttaatatgctgagccatgttctggccatttttctctggccttatgtagctttagcttttcattctcaaagcatggatcaaagagctataagaagaaattaaccagagactttatcctgattgtttcacatttccaaaggcaataaatcagtcatgggctgagagaagagaactgaagtctaccacaacaaatatatttctgccattttttcttttatttcctataggttttgctttatgaattttgacatgatattttcatcatgtgtagatatcatacctctttatgcttttattgcaggtgaagtcatttcctaacatcactgctccctctcccttctcccagcagttatctatgtgaaacaaataaatgttatttgtgaggttcagctaattcagataattagcattaccaagaggcttacaattattctggaatttgtgtttgcttatttgtttccccaaatacagctaaaggagaggagaggatcaccagatcttatagtaggcaaaactatgaattattagtaaatcttcctcctggctttctatctcactggctgctcattctcattgtccttcactctttctcctctgtttaacttccaaatgccaagcatccctgggagtattctcttcatttattacattcactcaaatggttttaaataccatacatatactgatgacacctaacactctagttctcgtctgtgtctccctgaactccagactcgtaggtccaactgacttctgcatatggctgtccagtcggcatctccaattgaacatcgtcagaacaaaacttcaggcttttccccaaccagctcttctggtcttgcccatctcaataaacaccactgctatctrcccaattaattgagccggctatctggtagttattcccttctttgcctcactgtcttctgatccccatatcctataaactctaataccaagtatccctggaatcctttcagtttttcctatctttacttcttctccttagtctaagctattatactctcttgcatagtttagcggtagtttttaagccctttttttatttttattttacgtttgccttttctaacaaattctccttaaaacagccagaatgatctctttgatgtatgatttagccaagtgtggtggctcccactagtaatcccagctactccaggaggctgaggtgggaggattgctgggagttcaagaccagtctgggcaacatagtgagaccccatttctaattaaaaaaaaaaaaaaagaagaaggaaacatgaattagattttgttgctcccttgtttaaactctctattggctttttacttcatttagaataaaatgaaactccctgtcctggcccctatttgatcttatttcctgtcactttcccattgtctgttatacctcacaatcactggactgcagttattgctgttcctccgaactacaggccttagggcctttgcaattgctattttctatggctggaacactttctcctcagatctgcaaaagattggtatcttgtttagtcagatctcaaattaaataccacactctcatagaggccttctctcacctcaggctggtgttggtagcagtcattgaacttcacaacaccttatgttaatgttgtgcagaacacttaccactgcctgatattttactgataggtcttttgtctgtttcctgccactcctgcccctgaaatagaaagcaagctccatcagagaagaactttatctgtttgttcacggcagtaattccaggccttggaagagggtttggcacacagatgttacttaataaacataagagtgaatgaatgaaaattgttagaagacaccatctaaagtgagtcagacaatatgtccagcttcttgtgtgtgctaattaatgacactttgtggactatatatctgtatataactacttcatttcttacagagccttgatagatgaaagtaactagacatttaacttaaaaggtgctaggtcatcttcagttccaggctgtaagcattaagattgactgtacacgacctgttaaaaccattttctgggaaaggctcttaagtacctgtcagagtttacaatttgagagcaaacataaataaacccaaacgcctttcaactttgaacatttgatgcttgaaaatcacctctatttaaatttttgctagtcacatcttctcatcttttggtttcaggacctgattcatcagtttctatagatccatttataaactcagtcagcattttactttgccagcctatgagcacaagtaggcaactggaggcttggaaaaaacccagacaacaacaatttgtttttcactggttctgctttcaaacaacttccaagagcacaatacagcaaaaagtgagagttatctatttctcccttcttcatccgaatacaaaatacatcctattttactgctttttttttgtcttttgcctctactttaagacttatctaagaaataaagaaaagccaaccactcgttctatccacagaagaaaaacacacaccagcatagacaacacaaaagactrtgtctagatgttaagactatatatcctataggactataattttcatagatctaaaaagtgagaaacatatatatgtataaaattatgtgggatgcaagttactgagattttgaatatggggctctgtcatttaccctaaaatgttcagtggtcttttctattttttctctattctcagtaaaatagaactttctcaacaattctggctcctactcttccaatgggctcagcttgtctcatgatttaatagtactaaaaaccttttcttaaaaagaaaaaaaatcctttttaaaaaagtttaggtataaataagaaatttctatattatgaaagactggtttgcaaagaaactttaatatcttctggatctcatctcaatcacagtctatgaaggaaataaaataagtgccttctaaaacggcctattatactactatagctgttgtctataaggaaaaagtttgttagtgagttgtattcaatagaaaacctcaaagatggctgggcgcggtggctcatgcctgtaatcccagcactttgggaggccgaggtgagtggatcacttgaagccaggagttcgagaccagctttgccaacatggagaaaccccatctctactaaaaatacaaaattagctgggtgtggtggcgggcgcctgtaatcccagctatttgggaggtgggagaattgcttgaacctaggaggcggaggttgaaatgactctagatcatgccgttgcactccagcctgggcgacaaaagcgagactctgtctccaaaaaaaagaaaagaaatcctcagagaagatatcctagaactatttagttttcccttaatcgagtctgaaaacctcctgtgcccttccaccacttaataatctaaccaactattgtaaaattacctattcttctaaaccaccaaatagttcgaatagaatagccttagatatctaataactaaatgaaaccacagtttacctctctaggcttcagtttcttcttcataaaataagaagcttgaactcgaaaagttttagatgcgaagttcccaaaaatctagtagaggaagcaaaactctgtttggcaccctgtttccttgccctggacttttagcatttctttcttctggtgtaaagtcaaacaaaaaatagagatgaatctctaaatttacctttttattggggagataagagttgcaatacagggcatacacacagacctgatagtcttctgtatgtcagaagaacaaagagaaggttggaggttttacgaaaaggagaaatgtcttgtcctgaaagaaatttcactggcactagtaaagttgtggggagtggcaacctctgattggtgagtgacaacagtgcagtaggtaaaactaatcttagactcacagtggttgtcttagctgctattagataaaagtgatttcaggttacagcaggcagtttcagcagctaggtttgcagagaattacattcctagaacatgatattttaatatacatatccattgtgaaataaatactataggcaagcaatttaacatatttatcactttccatagttaacatttttgtaagagcacataaaatctacttattctgcagattttgaatatacaatacaatattatttactataatctttctgttgtacattagatctctagacacactgattctttttttttttttttttttttttttgagacggagtttcagtcttgtcactcaggctggagttcagtggcgcaatctcggctcactgcaacttctgcctcctgggttcagatgattctcctgcctcagcctgccgagtagctgggattacaggcatgcaccaccatgcccggctaacttttatattttgggtagagacagggtttcaccatgttggccaggctggtctcaaactcctggcctcaggtgatccgcctgccttggcctcccaaagttctgggattacaggagtgagccaccatgcctggcctagacatacagattctacatgattacaagtttgttccctctcatctactttccattttctcctctccctgcccctggtaaccaccattctactctctgtttctatgtatttgatttttttttttttttaagattctacatgtaagtaagatcgtgcagtagttttgtttctatgtctggcttatagttcacttagcaggttcattcatgttgttgcaaatgctagaatctcctttttaggttggataattattccattgtgtatctataccacaatttatttaccgcttcatctgttaatggattcttaggttgttttcatatcttggctattgtgaataatgctgcaatgaacgtcaaagtgcagatatgtccatgaggtgtttatttcatctcttttgggcatacccagaagagggattgctggatcatatggtagcagaatgttttatttggaagggaaacttttatactgttttccataatggctataacaatttgcattccctctgaaagtggacaagggttccctttattctacactctcaccaacacttgttatctcttgacttttttatacgagtcagtgtaactttaaatccacctggcctgatgctaaattatgaatgggaaaaattatattaatacttagaatcctgactgggtgcagtggcttatgcctggaaccatagcactttgggaggctgagatgggaggatcacttgagccaggagttcgagaccagccagggcaacatagtgagacctcatctctctaaaaaataaaatattagcctagtttggtggcacatgcctgtagtcccagctactcaggaggctgaggtgtaaggatcacttgagcccaggaggtcaaggctacggtaagccatgattgcactactgtactctagcctgggtaacaaagcaaagcaagaccatcttcacacacacacacgaaaaaaacttagaattccttttttttttttttttttttttttttttttttttttttgtggtagggtctcattctgttgccaggctggagtgcagtggcgatcttggctcactgcaacctctgactcccaggttcaagtgattctcctgcctcagcctcccgagtagctgggattacaggtgcctgccaccatgaccagctaattttttttgtatttttagtagagacggagtttcaccgtgttggccaggatggtctcgatctcctgacctcgtgatcctcccgcctcggtcccccagagtgctgggattacaggcgtgagccatcacgcctggctaaacttagaattctttacattcaaataatgtctggtatttttttacattattttcatgtatattccctaatttaaacttatccccacccccccccaccccaccatgatgtcgtcaacacagaactgttttctagattaggaaactgaggatagggattttaagtatctcgctcctagatcaggaccgcatccaggttgcagaatcccaatccagcactcttccacatagtcacagcactaccccaactctaatctactgatgacacagaacaaaattaaagtccttgtccaaatcccagagttcatgaacacagagatgttaatgctcctgtagttcatactgcaaaaagaatgtgagagcttgtttcatttttcacttagaaaatgtatgagatgttctttctgaaggggttctgtcactaacaggttgcattacttgtacaaccattatatctgaatcttcccagaccgtggtttttttttgtttgtttgttttgttttttattaaatactgtcattaaaccagaactcatggatatctatgtcatttccagctataaaattctagaaacttggggattttacctttttgtttcttattttattttcttttttatcaaaagccttatcacaggtaaaatggtaatctaagcaagaataagctctgtcatgatttatgaagcatggaaattcagctgtggccaggcacagtggctcacatctgtaatcccggcactttgggaggccgaggtgggtggatcacttgaggccaggagttcgagaccagcctggcccacatggtgaaaacccgtctctactaaaaatacaaaaattagctgggtttggtggtgtgtgcctgtagtcccagctacccaggaggctgaagcaagagaatcgcttgaatctgggaggcggaggttgcagtctttagcatgggtgacagagtgagattctgtcttagaaacaacaacaacaacaacaaaaaccaacaacaagcacaaaccaataatagaaactttaaatgattctgagccttgagaggaatgtgattatgcaacctgggaaattcacctgcccatgaatagtatctctgtaattaataacaaagtcttacaggacagtccttgccatcaccatatcataaacgtatattgcttcttttagttcataggaacagggtctcctgctgtgtcatagctgtaggatttagcctaaatgctcagtgagtttgatgctcccttgagcaagcccgcttatttaagaaagtagtttttggatattcatggtttattgctgacagttaacgttctcaaaatagtgagagtcctaaagtcaaaggggaatttattaacaattttatttctgagaggatatgacaacaacaaagacattaataaaaaacaccagcgagctttctggcaatatgtattaaaattttcaaaaacacttatactctcgaatccagcagttattatttcgggaaattgctctaagaatattatctttttatacaaagcattttctgaagagaaktattcaggaaattttcatttatgaacagaaaaagtccaacattatggaaatagtgatataaaatacagcatatatagttctttggtattttacagtcatgtaatcatggagagaaatacttcagataaattaacataataaaccacaatacaaaaaagtatatttacaatagaaaaaaagtttaaaagtgtgttagcaatacaaataaacaaatacaagaaggatctatcacaacaatgctacagtgatgagccttcagataattttcattatttttcttgatacttctatatgttcaaaactttcattaatgagcctgtaataccagcactttgggaggccgagatgggctgatcgcttgagctcagtagttcaagaccaagctaggcaacatggcgagactccatctttacaaataatacatacatacataagtaactaagtaagtaaattagccaggcatagtggtatgttcctgtacttccagctacttggagggctaaggcaggaggattgcttgagcccaggaggtcaaggctgcagtgagccatgtttatacccctgcaatccagcttgagtgacagagtgagaccctatttcaaaaaacaaaatttcactgatgacaataaatattaccttgacatcaaaaaaaaaaaaaaaatccagtgcctggatgatcacccagtagcatctaaaagtgcatttgaatatatatccaggttctgatgccagcattgatgcttgttatgtgacaaaaagaaatcacctaactgctttgggcttccatttcttcaaagtaaaatgaagtggttaaacaggattactccccagatgtctccccaaactttacactggtgtaataattgtttgcaaggatcattgggtgattatgtctaaaagcctgcagttattagtcctcatatcaggaatgtgctatccccattcattttattgtagaacctggtttgctgtgggatagttgaaatwtgaagaattcacttggtcagtgtgtttcacggccttgctactttttctgcttggatggactcacttctctatatgattttctctttaaatcagaagtatttgacctgaagcagtaactcctctattcatataatagtgatattctgatacatatgtgaatattataaaaataagtagaatgataatattattactaatattattgtggcagtaataatattatcattcacatgtgatcaatagtaaaagcacacacagcaacccctcaggatttcatcctcaggccattgactcccatcacctttactgatatttagcttagctttacaatcctcccctttgaaaaattcatattttaaccttgcctcccataaagacacacattttttcagatatagaatttgcaaggctgagacatatctttttagaatgaacccaatataaacacaaagcaacataggagaaaagtactagttacatgcccatggcaagaaaatatgcctgaaatggttctgtttattttgttgttgttgtttctgcttggaatttcagcagttatttggcaaagtgattagctagctgggaaggaagaaagctcgtctccatcagccttttgtcagagcccgccttttggtcccrgagcccccatgaaagtgtgctgtagaccaggaccactgttgccctgaatgcatgagtatgcagcctttttatcgtaggcttgtcatctcctgagttctgcaatagatgccatgtgaaatccagtatatactcagtctaacacatagctgctgcataagaaaatttctttccatgcttaagcaatttctgcatagagcttaattcatagaaatcacttattcattcaaaaagcattcactgagttcctagtaggggccacatattacgctaaagtagatacaaggataaaccaaatgtagatctgtcctttaaagagtataacatgtagggaacaactacactctacatggcaatagaaagtcacaagtgggtgagaaccacaggagagaaacagtcagagggtgatgacagccagaactggtatgatgtgaaaggtcaatgacatcagaaacggcctcagggattttatagcctggctccttcaatttcagttcttggtataggccagcttttcaggactgttgattgtccctcttctttgtgtgaaattcctagtgsacagagcttctgcagtgcctcttaggtactttgaaaatcccaacgataaacatctggacccaacacagaagcctccaggaagctgtcttgttggcagtcacctacgagcaggcgataaacacaacacattaaatagtatgtaatgctccagggattgcagtcctctgcctcctaatctctctgtcctttcctcttttattgacytgtcaggagcatgacasttgtgcacaaccattagcacacaagaaatgactttcctgtgggggtgatggggactggggaacctactctttgagatagaaagttaccctgatgcagaataattacagtccagcttagcctccttataagcgattaatcttacttttcctcttagcttctgtctgtttgtaacctgaggttgaccgaagttagttcttttagttggttcttgagaaaaccctttcagtctgtatttccaggaataaatcttaactctaatttaaaaaacaaaarggccctataaatagttacttcaaaccctttaatttatagctgcattctcaatgtcttcatcctcccaaaatcactcacctctacatttttgccctaagtacctaggttagcacaacttttcacaacttctctttaacatttctctgaataacgtgaaccttccttatttccttaaaatataaacttatatatgttcttcctaggagattttcaacttttctgttctccacttattactctattcactctgttctctatctgagctgtcactaattagtatctacttaaataaatatttgagcaatttaacattacagtttttttttttttttttcagcaagaagtgtgttcattatccattaaaagcctgggagagggactactaatgttacaccatcaatatctatttttagccacttcggttttggaagtgtctcttcttttggaagtgggagaccaagtggaggggaagaacatgaacaagggattgaagccattgagaaagtcatttattcattcgatagatatcttctgagcactgcgctaggacctaaggacagaataatgaaggcagagtttatccttccactagcacagcagtcaaaaccaataggaattaagattrtcagaagtgacaaaactgtacatagacctgttcacataactaacaagggaaacgatggaggtgatrtggaagtctgaacgtggtgcaggaataactcagccaacatccccctcctttgggaaatttagatagatgtaggtagattgagaagtgatataacagtcatgtggcatcattgagagagtcagttttctataatgacaaagacatggaaagagagatgtttagtacatgtacagcagaaggagttgattcacaacgcaatggaaacagaagtcaagaagacagtgaagtggatgaagcaaggagaaatcataaaaacaagcacactgggactgtcggacctcaggggagagtgacgtggatggtaaaccaagtttggggccagagaaaagtgaaagcttgtgctgttcttgttggtagtcatgggcaggctgtagcagggttattattaaaactctgatcccccaagtccaactgaaggggctccagtcactaccccatcatctcagtggtgagatgtagtcaaggcatctaacctctctgcctcagtttcctcatatgtaaaatagagacaatcattataaagtgtttagcagaatgccagatccacagtaaatatcagtaaaaggaaatttrtaaatttgtaaattgttagggaatggggtgagaccctcaagattctaatcttcaagggaaagaggatgctaaggaaagtcagaggaagcccgagaatcctaagagaggatgatacaagcaaattaattaaggaataagatcaaagaatattgggaaatgtttaatccacttggtgtgggaaaaggacttttwtgtttgtttgtttttgagacggagtcttgctctgtcgcccaggctggactgcagtggtgcgttctcggctcactgcaagctccgtctccctggttcaagcgattctcctgcctcagcctcccgagtagctgggattacaggcgccagccacaacgcccacgcccagctaattttttttttttttttttttgtagtagagacggggtttcaccatgttggccagattggtcttgatctcctgacttcatgtgatccgcccgcctcggcctcccgaagtgctgggattacaggcgtgagccactgagcccggccgaaaaggactcttttttttttttttttacacagagtctcgctctgttgcccaggctggagtgcagtggcgccatctcggctcactgcaagctccgcctcccgggttcacgccattctcctgcctcagcctccagagtagctsggactacaggcgcccgccaccacacccggctaatttatttatttttttctttttttcttttttgtatttttartagagacggggtttcaccgtgttagccaggatggtctccgtctcctgacctcatgatccgcctccctcagccttccaaagtactgggattacaggcgtgagccaccgcgcccgaccatgaaaaggactctttttaacctcttctccatgtctaatctgagtttcaacctttttattcttattctgttataagtacttctcccattcaagagcatataaaactagaattactttgggatgagtgtgagtgggggagagagaaggttgggagatcactagttgtgtttgctggtactgaatcctaccctaatacttccgaaatgaacctcattggataactcaactcttcattatgtttttgctaatcttttaggagcctttttgcaacccaccgtctccctaccctcgttgggtctttttttttttcttcttcagtcagggttttgctctgtaacccagtggggaaagtggcatgatgatrgctcactgcagccycaaattcctggactcaagctattttcccgccttaccttcctgagcagctgggactataggcgcatgccatcatgcgtggctaatttctaaaaaatatatatttttgtagagacatctctctatgttgcatttctggtcttgaactcctaggcgcaagcaatcctcccacctcagcctcccagagtgctggggattgcaggctgtttaatagaagttatcaacatatggagtcatttatgtctattgaaatatgaacagccaattcccttcacttgtcccatttctaattcagacactaattctgtttcagtttaacttggatcaatggacttatctttgcttctgttcagttatctgtttcaacaacaataagattctttatctatatggcatagtgggtgaaaggacacactaaccttacctactgctccttttatgtcagaaaatccattttctaatcactttttcttggacccaagtgagtctgttttttcccctacattttgtaatttgtcacatttacattttaggtgggttgttctaatcgacttttcttataaaagggtagtggttctagatcaatcgccatcaatcatgctaccaagcaatggtgaagtaccctttttaaaatattttatttagaagaatttcttatttcagatacaacagatgatacaagttgaatctagtagggtttagtaagagacaataaacatattaaacaaagccttacgtattttttaaggtgaaaaaaatcccccaagatagagtccgtgcttagaaactacccctgttaaatacttaatatataacatttgtaatgttcaaataccgaaagaaaaaaatgtacttgttcagagtctattcttgagtcaacctaccttctcagctctactgaccccaaacaaggtaaacaagctgatttaagttacaactaacttaaaaattatacatctaactcttttgtaaataactttagggctggtgctcaaaataattggaactagctatgaaaagaaagctagaaatgagaatgaggaaaattggtagtaagtgtctatagagaagtgtggaccatctgcaattcctatatttaaacagggagaagagggagatggggactcactctctccctcacaaccacatgactaaactggcccagccaatatctcatcaggtgtctccaccactttacaaagccactgggaatttatcaagggataaatacaaaactggtgtagggagaggggaatgggaagttacttccaaagactctgaccctgagttcttggcgtttattcttttttttgagacagtctcactctgtcgcccaggctagagtgcagtggcgcgatatcaactcactgcaacctctacccctgggttccagtgattctccagcctcagcctcctgattagctgggattacagacacccgccatgacaccctgctaatttttgtaattttagtagagacagggtttcaacatattggtcaggctggtctcgaactcctgacctcaggtgatccacccaccttggtctytcaaagtgctgggattacaggtgtgagccacygtgcccggcccttggcctttattcyttattttccctgatattaatccctaatgaaatgcatttagtacacattcatctttttaaaatgtgcagtttttgtcacagaagtagtgtaaaggacaccagaatggttggaagacgatttttgtggtcttctacaagtcctgttttggtgactctgagcaagtcttaaccttgcctacatttcctcacatttagggcaagtgtactcttcagggtcaactgcaatatctgtgggagtgctttgtgttttgtagcatgcatcttactagtgcttttgttgttgtttgcgttgtcgtgygggttccccacctcccccataacactgtaaagaaatgctgagactaagtggtagggagtggcagccatctggtgaggatggaaagttaatatctttatttatgtaataaacctccctttagaattctgttactgtcaaatttctcctggaattctaatagtattttcgctatgtgttttgaccttttgctattgggaagacacaagtttatgaatgacaaatgggtaggggaatttaggctgcacagttaagtaggaagaatgaagtctttgctagagttagaatccagtttgaccttgaacaagttactcaatgactaagctccatttgcaaaatcgttttgttaaagggattagaggtaacatatctacatatgtacatgtgtacagtggtatggagaatggactggatgaatgcgtgctgttaccaatgtgataattactattctttttaaaaatagagtattttatgcatacacaatacttattcaattcaatttgccttagtgcacagtgatggaattttagaactggaattgacttcagaaataatctggtaaacgaaatcttttcgaggctcttcattttatggttgaggaaactaacatcctgagagctaaaagtcatcgttttcctttaaaatatctaaataatcccagatgttggatcagaactccaaagtcataatcagggcttttcctatttctatagtatttctaatactataacatgctattgctcagtcttttattctctaattccatcctggtttctagaccaaatatacctaattgtattctaacccacaagtacctcatcaatgagaagtctgacctatggtttatgatttccgcagacttaaatcaaccctgggcttctatccttatactagttttattttatgttttttgtttgtctttagagaaatgatcgtgttctgtcatccaggctggagtgcagggacataatcacagctcactgcagcctcaaactcctgggctccattgatcttcctgcttcaacctgctgagtagctaggacyacaggcacgcaccatcaggcccaactacatttttaaatttttttctagagacgatgtctcgccatgtttcccaagctggtcttgaaccctggcctcaagcaatcctcccacctcagcttccctaagtaccaggattacaggcataagccactgagcccagccccacccttacatgttttctcttggcatcctgatccctggacacaaccccattgagatacccttccatttaatacttttcttagtcatttaccaaatgtgtttayagtaatatattcccatatatttgtggcagagtacagcactcatataaattttgatgaacacagacatgctgtcccatacttgtaggtaaaacaatcatgtgaaattaaaataaatattttgtttagatagatcttgactatcatacacttattctaacaatattgcccattcctcaaaacattctgggaactccttgaaataaaactgactatggtaagaagagtttttctgggagttgggaaactgattccattagaaggcagatggtgatagtctcacagcacactctctcccatgcggtctctattctacaggcatgcagatatttccaaaagcatcccttccctccagggtcctgaagaccctacctctggttctgccttggactgctctcagtgatattccctttttttttttttttttggacggagtctcactctgccgccaggctggagggcagtggcaccatcttggctcactgcaacctccgcctcccaggttcaagtgattctcctgcctcagcctcccaagtagctgggactacaggcacgtgccaccacgcctagctaatttttgtgtgtgtgtgtgttttttttagtagaggtggggtttcaccatgttggccgggatggtctcgaactattaaccttgtgatctgcccacctcggcctcccaaagtgctgggattacaggcgtgagccactgtgcccggccgatattcctgtttttatggttgcaattgtatgctatggcaccggtactatgtgggaagaatgatgctaggtactctactggtatggcctcatttgtcgatttgaggattattggtttatttatgcaaagcacataggatcataggattgctctctaggagaatggagtaattaataccatgaagactcatagacaatgcttcctcccctagaaactcattatttttcgaattttggcactgatctttcctgcctacttcctggcttttactaccttgtgaaaaagccccaagtgttagaagcagcttccccagyttactgccatcccttctaaggtccctggacaccactgcttgtctcctaccttagaaagtgcctacttggccaggcacgctggctcacgcctgtaatcctagaactttgggaggctgaggcaggaggatcacgaggtcaagagatcgagaccatcctggccaacatggtgaaaccccarctctactaaaaatacaaaaattagctgggtgtggtggggcatgcctgtagtctcagctacttgggaggctgaggtaggagattcacttgaagccgggaggtggaggttgcagtgacctgagatcacgccactgcactccagcctggtgacagagagagactctgtctcaaaaaaaaaaaaaaaaaaaaaaaaagtgcctactcataccctcctcctatttattctgatttctgtgcatgtattctttttgtttgtttgtttttcagagacaaggtcttgctctgtcacctaggctggagtgcagtggcacagtggcatgaccatagctcactacagcctcaaactactcctgggctcaaaatgatccccctgcctcacctaccaagtagctgagactacaggcaaatgccaccatgcctagcctgtgcctgttttcttaaggcagaaatgatctaaaagtgtggcagagggaaaagaagatgggacttagagcttaaataaatctagatgaaaatgttggttctatcactcacaggttctgtgatgttagggaagttaagttatttgcaataaaaattattaatattgtagaacatgtattgatcctatgtatcaggcttgaattaggtgctttaagtgggttgtctcaattaattcatcactctgattttcaattttctgttctaagaaatgagatcaaatatgcctatcttgccgaagagtagtaaaaattagacaggtagctgcctctggatcctgcagggtagagaaagtattacatatctgcatgtgtggatgtgaaggacacacagatacataaggtaaatgagaatttattataaaggtgtatttgacaaaaattggggaaaaaaggaaaattggagaagatatctttctgtgagattaaagacaaataggggaaaaaagggaccaatgacaagaattagagcaaggtatgtaawgaattccagagctggctctaagagatagagcagctggtcatatrtgaaagggatgattcattcttcaggggctatccctcgtgatcctatttccttgcacaagctatcagttaatttattgattcacctcctttatgtgctcataggcatcaagaatacaatggatcacatacaattacagaaaagtttcatttcaggaggtcaaacaggaagtttctttctgacttatattgaagtactcatgatgacaatggagaaaaatgaacataatcttttatgggtggggaccatgtgatctcttttctttcaagctccagagggtttataagacatttccatgttcaatttgattccggaaattatatgttgggtagaacagactcttttyggcaactcatgagaattgccaatgatcccagcatttgctactcttgatagtaattcccttcatttcctccatttttatacatgacctgcagtaaatattgacagttactttgctggaaagaataacacagagacagcttttcttaagctccaaactgaatttcgtggttaattgattggccagctggccctgccgtctcttgacctctacaagagccagcaagattgatggtttcagcagcctttcatggtgcactaaagcattcagatctatcttttgttatttgggaaacactaagttcttatgtagcacattatttacatggactcaagggctgacgagctgggaggcagcaaatgcccaaatggaagacaatgtatgtagatcaaagaagccgatgagacagagagttcataaaatgtgaatacaattccaggggagaattgatgattatggaagcagaaagccaattgagttaaatattcattccagcaacaagtctgatcgtctcactgggacctgtgcctttccgaagtttcctcakcttttcaaggtctacacaaggaaagaacaaagccatcaaggaggctctcattctggaaagccggctgcaagatggcatgaaccagaggtcagcggccaccactgagagttcatcgtattcgcctctgtaaagaataagcctcaagcagtggttctgcaggagcggttcagcatcatcaataccaatgagccctaatgaatgtgacaattcagaatgattgggccttttcctccaaaacgtttttctcctcaaaagtaaaacaggcttgaaactcatgtcttatatatgctgtttagattttcatatattaatgtcacgaatcagatgataggaaggtatattaacaagtgagacattgggatatggccccttgttcaagagcatcaaagcattaaatatgttgttttaaaaatacctttggcatagttttaccacctatttctcaattgccatcaaaattttaacttttaatgacttttggaagtaggttagatggggtggtgggagaggaatagaggatacagaaagataaaaactaaatccaaaaatagtattgaatgagaattactaataagaattattaattgagtgtcttctcataaaaatagtaatatctgttctttggtctctcacaatacatagtttaactccatatataatttaatgaatgcaatgtgtcactttggttataggtttgcatcttggaaacgatgttagtagaaacaagtcagtttccctctgttcctttttgcttagctttctgggctatcttcaccaatgccacagtccatctgtaacagaatgcattggagatttgaaaaatcacgacagataataaatctctatatacttctcatcctctggaacaattgagacattgaaattgcctgatctttttgagtgagtgttgccactttgacccaggcaaatgagaaataaaacaacaataccaaccagcagtttcaagtatccttctgctgcataataactcagcagtaggctttgctaatggtgtttatgagctgccaggctagaattggcccttaagcagggaggcatttgcccagtgggcttcttccatgtgggggggcctttttgcagcctgggggcccttttaggtgattctcagccggagcggtctcttcaggccaaagacttttgcaatgagctaactatgttcaattattgctttcagatccaccctacattcaaatgttttgggacaccaatgtaataccataaaaatgactgtgtaggacacgcctatgctaatgtcatgactggtttgttttacgtattatttatttatttgatactgttaataaaaagcaaacaagccaaaaagaaatactccccaacgtttaatagagatcattgtatcctaaaatcttatagcacattagagtgcaatgaagctcaatgtaacaagcatcaacaatcaactacgaaatgagtatggaaatagagtatatccaaggaagacagaagtgtagaccacatgatgacagcgggataaagacaaaggagaaggtaatcgagagccaagggttaaaccattcaaattgtcctttggcattaaaatgatccaagatgtttcatgagttcaggttaaaaaaggaaatcagtaaaccccaatatactttaagtttcatttgacgcccacaagctgaaactacctctttgtggtgtgtgtctttacatcagcaaagagtataattgaatttggttattatctccagtgctacctgtttggacctgctatttcaccttcctgaaaactgttgcattgagttctactggggaaaattcttaagataacatctgtttactaagaagggggtgtgcttacctgctctaaggtattgaaatacattgtaaatctatacctaattcatataaacataatttcaaggaaaaacaaaaacataagagacagaccctggcggagtgccaaagaatttgtcagggtcccagtccctgtaccttatgggagaattaaattcattaaactgggccagatgtggtggctcacactggtaatctcagcactttgggaggctgaggcaggtggatcacctgaggtcaggagcttgagaccagcctggccaacatggtgaaaccccatctctactaaaaataaaaaaaattagtcargcttggtggtaggtgcctgtaatcccagctagtcaggaggctgaggcaggagagtcgcttgaacctgggaggcagaggttgcagtgagccgagatcgtaccactgcactctagcctgggcgacagaatgagactcagtctccaaaaaataaataaataaattcattaaactgaacaaattgagcccaatttatttgtcatagttcaaagaaaaggagagagtagagtaaaggggcttagtgcaaatgtctggtcagatactcaaaggtttagagcctcttaacccttatatttctttacataatttattctcattattttttgtttgttttttgagacagagccctgctctgtcatcagtctggagtacagtggcgcgatctcagctcactgcaatccctgcctcctgggttcaagtgattcccctgcctcagcctcccgagtagctgggactacaggcatgcatcaccatgcccagctaattttttctattttggcagrgatagggtttcaccaggttggccaggatggtctcaatctcctgaccttgtgatgtacccrccttggcctcccaaagcgctgggattacaggtgtgagccaccacgcccagcccattcttgtttcttggtaaaggaaaatccaactatatatatcttctttaggatcacytaaagacccatacagatctgtcaaatagacatccaatattttggtaggctttgaaaggaggtgcaaaaggatgagaaggaatttagggagatcattatctgaatcattgaacaaatgctccttaagcacctggtgaagagaggctactgagaagcagagcacgtggtcccagcctacgaggtgacaaagtaaaatggcagaagcaatttgtaatgatctcacctatatgtggaatctaaaaaaaagtcagcctcatggaaacagtagaaaggtgattaccaggtctgggggctaggagagagatagggaaggggaaatgctgtcaaaggatccaaagtttcagttagacagaaaaaataaacttcagtgatctattgcacagcatggtgaccacagttaaaaataatgtatggtacatctccaaattgcttaaaaaaaaaaaaaaggtttcaaatgttgtcaccacagaaaaacaaaaacaaaaacaaaaaaaacaaaaaaaacgaggcaaggtgatggagwtgttaattagcttgatttaaccttcctacaatgtatatgtgttagtccgtttttgcgttgctgtaaagaagtatctgaggctaggtaatttgtaaagaaaagtggcttattttggctcatggttctgtagactataaaggtagcgtggtgctagcatctgcttttggtgagggctcagaaagcttccartcatggcagaaggcaaagggggagcccacatatcagatggtgagagggagcaagagttgagggggaggtgccacrctcttttaaacaaccagatctcatatgaactcagagcaagaactcactcattatcgtgagaacaacaccacgctattcacaagggatccacccccatgaccaaaacacctcccactgggccccacttccaacactgcgggttacatttcaacatgagatttaaaaccatgtcagtatacatacatacattaaaatatgcatcacattgtgccctatacacatataaattattgtttgtcaattaaagaaagaaataattttaaaataaataggccaggcgcagtggctgatgcctataatccaagcactttgggaggccaaggcaggcagattccttgagcccaggagttcaagagcagcctgggcaacatgatgaaayctcatctctaaaaaaatacaaaaattagctgggtatgtggggggtgcacaggtagtcccagctactcaagaggctgaggtggggggattgcttgagcctggcaggcggaggttgcagtgagattgcaccactgcacaccagcctgggtaacccattgagaacctgtcttaataaataaataaataaataaacaaacaaataaaggttgtgttagaacaaaaaagaaaaagagtgacaatgcaagccacatagttgaagttgacattaactagcatgtgccaacgagtgacaaaggaaacaagtgcaaagcaagaaaagttagccattatcatggtccatagataatactctcaaccccggctcttgagtgaagcagtattgtgcagtggttacatttatggacctaatggtcaaactgcatgagttcaaatcccagctttacagctawtggttgcattatcttgggcaagtcatttaacatctctgccttaattgattcacctctratatagagctgataggagtctgaaatagctgctataaggactaaatacattaatatatagatagcattcataacagtgttttgtggactttccgaaggtgctgggccttccagttgccttaaagaatggattggattagggtggaggagatgaaaaaaggcatcacagtacatcaagtgmatggtgccagtgtaagtagaatacaggaataaggaaatgcccagcttgttggggggttagtatgaagacctctaactgggactgaaagttctagcaacagtaaaataccctggcctccaactactaagtaccctgaatactaagatgagtttatttttcattctatagacaatttccatctctttctttcaaaacaaacaaatgatgacrctgtatgagtaacagaagatgactgggaacagaaccgtgaacagaattaagcacctgcaatcaaataaaattcacagaaaacttaatttaccacattagtgatatgcataatcgttgttgtrctggtaaccagctcttcaggaaaaaaaaaagaaaattcctgatttgttaaaatactgtcactatggcccactgaaactatcaaaatgaggcatataacaggaaattgggaggagagttatacaatcagctcttgctagaaaatgatgatcattgacattacccttatggaaccaatccaaatttgggsgttgttttctttctttctacttttgtgtgtgtgtgtgtgtgtgtgtgtgttctctggtatctgtaaataacatccatatcagtttctccatccattctttgcacatcactggtaatgcctgagatcaaatctgccatgcttttccgggcagatccaggctgggatctcagtatccctgcttccctgaagctgtccaacctcactcccttcattgctctgctgtgattaggaaggagccattccaaggactatggggtgctctgtgggataagcccagtccttcttccatacaggaggaacaggggacgggtgctgacaagaggaaatgcatggagcagagagagggaacaggcagatggactcaaggtccccagactctttcgagtgttgartcagaaggactggagctgtgggggaagagggtgggaacagggtagtggaataacatgcagacagatgggctgaactgaaggtccagaggcactcccagccgtcaaccagcagttcttacaccaggttgatgttagggaacaaccccagctttaaaacttatttataccaaagtgccaaatgactcatttgagacaaggctttgatctctggggacagggcgttagacagcatgaggcttaggttgccaggtgtcttcccacagttcctgtcttgtgtatgttacacactcaattcatgtcaggatgacactacattggcatgatccaagggaacccataactgacatgaatatgtgtgtgtgtgttgattggggagatgggaaagagaacatttcttccagattttctagttcttatagttcataatcttaatcctcatctccacttctctgccacttctctggctaaatccaaagcacagcctggctagagaggacttctcttccttgggggttctagtctattctctgagttgtgacaaacatttccattccctgtaattacccacttgccttgtctctgaagaggcattcacagaataaaccaaaagaattgtagtgttaggaagatgtcaaatcatttgacctctactccatctccggcttttccttctccccccatgaaagttatgcatttagttgcctcttgttcattagtctggacttagagcaaagtgactacttcaacttcttgtgctcaacatatgccacagttgcttacatgtgataagtccatttgtcacttgataagcctttgctagaatttccttctctccatctccaaccttataatgatcttgaaggcaatgtcggaggctaggtaartcttctttgtgttccccacttgagcataggtgagctgtcatgtcaatttccttacactactgagaagaggggatgtgggtgggcagggacccccagaaacaactttacccctttcacagtttccatcactgcctccaatgtccaccgacgttagaaagtttgggcagaagtggccaggtgcggtggctcacgcctgtaatcccagcactttggggggccgaggcgggcagatcacaagctcaggagatcgagaccatcctggctaacatggtgaaaacccgtctctactaaaaatacaaaaattagccrggcgtggtgtcaggcgcctgcagtcccagctactagggaggctgaggcagaagaatggcatgaacccaggaggcggagcttgcagtgagccaagatcgcaccactgcactccagcctgggcgacagagcaagactccgtatcaaaaaaaaaaaaaagaaagtttgggcaaaacctagagtttcagggaaagtcatttgaggtttggtttaggcaggaaatagaacaaaaccagtgtactaaggagaatacagtggaaataagagggaaaggaatgaagaaactggtaggctactaaaatgcccaggtacaaactactgaacatccacctttatgctgtcagtgggcagaaaaagaaatagacaatgacaagatacattttgaattagtgtgatttaaggactggctgatgtgcacaaaacatgagagaagggagtcaactttgacagagatttcaagagcagatcactgatgaaatgtgataacattcagaaaatagagaagttgacatgggctttgatgaaaacacaatgagttcagtttgaagcattttgaagtcaaggtgattttgtgaaatacaaacgatgctgtccagcaggcatagaatctatctggagycatttgtacaatatacctatgccttttttttttctttctcctactgtagacttagataggaactcacttttgtcttttttctgctaggccaataaatacgttctcagcttagaaaaggggctttttggtttgcctatttctgtttctttttacagaagttaacacatttatttgtgacctattaaaatcatgaagtattaccactgggttttatgttttaatggaaacatttcatgtttagagaataatgatgcttaaaatttatatgaattaaaattttagcctgtaaaaagagcctggaaatatcttcataccatcatctatccttccacttaaatattaatcacaaagaagatcaggcgtagtgaacatacaccacgcaacctcccattcagagaattcttgtgcaaagaaggattccaaagggtttcagaaatactaaacttcttgaaattgaaattgaaattgaaatccttcttggcttctctacctgttacttcctctgcagtgctcagtatagtgtctgctctccctcctttctttttctttttttttgagacagattttcactcttgttgcctaggctggagtgtaatggygcaatcttggctcaccgcaacctctgcctcttgggttcaagcgatactcctgcctcagcctcccaaggagctgggattatagtaccacgcccagctaattttgtcttttcagtagagatggggtttctccatgttggtcaggctggtctccaactcctgacctctggtgatcctccctcctcggcctcccaaagtgctgggattactggcgtgagccacacacccggtctgctctccctcctttcttcacttttctgcttcctctctcatattaataataagcttctatctttccttaattgtttacatatctgtctgtcctctttctccaccccacgaactcctcaaaggcagagtccctgtcttttttatttcatatccctaatggtagctgcaaagcagacactcaagaaggaaggaaggaagtaggtgggagaaaggaagaagaaaggaaaatgaaattaactactagtttgtttccctgtttcattgagaacacacgtattaaccaaacaagtaaacaattgtcagaatattgcattttaaactcctgagagaagttgctgcttctgtggcatttctatctaattaagtttccccttaaagttgtaatcttttctttcaaatctcataatacgtcttatttaggtgatcataccaattatatctttcccactcaaacccctaaagttatccttgaataaatgagccttgcaaattatatttccccaatttgcacttatttctttcttttttttcttttttctttgagacagagtttcactcttattgcccaggttggagtgcaatggagtgatctcagctcactgcaacctccgcctcctgggtttaagcaattctcctgcctcagcctccyragtagctgggattacaggcgctccccccctccccatgcctggctaattttttatatttttagtagacagggttttgccgtgttggccaggctggtctcaaactcctgacctcaagggatctgcccacttcggcctcccaaagtgctgggattacagatgtgagccaccgcacccagcctcagaatttcttactgaataatccttttatagtttgttataactaacwcaaaacagtagtgggagttcttattcagatagctaamaaattccaggcacctcctgtactataagtgtccctcatagcacaaaggggaaagctgccctttaagaatccataaatgcaatgaaactctacttacgccacccaggttgttaggacacaggaatattaatctggagaagcctttgataatagaatatagtcaaagttgacattgtgctagaatatttgaattttttattttccagaaattattttcactctttgctacatttactgtttgacctcaaaagaatgtaaaagcaagtttttaaatacaccattatttcctcaagaggctacagaattgctggatttttttttttttttggaatggagtcttgctctgccacccaggctggagtgcagtggcaygaccttggcacactgcaacctccacctcctgggttcaagcagttctcttacctcagcctcctgagtagctgagattacaggtgtgtgctcccatgcctggctaatttttgtatttttagtagaggtggggtttcgccatgttggccaggctggtctcaaattcctgacctcaagcaattcacttgccacagcctcccaaagtgctgggactacatgtgtgagccactgtgcccaacccagaattgctggaacttaatgccaactctcaattgtctttccttctgctagatctagttaatagcaggtgtctgatacatgttactgaagtgaatatgaaaaatccagagtaagcaaataaatcatatttttttaattaaaaacatataaagtacatttttgtcaaatgaacctaattggcaaagcaaaatctcatcttttaaatttctgagtttccactattgataaaaaaaaaaaaaataacgtaaaacagtgttggattttcaaactcaaaagaaagaaaaaaaccacaaaaaacaaaaaaagcagaagttgggtaaaaacgagttctgactaaaagctgcaatactgyctcaaatgtgcccrtgaccccacctattgctcaatttctacaccatgagggtaaagggaaacgaaatgcaacttggattcacttgacttcttaagtcttacagagagagaaactgatcagaaaagatacatttttggaggttggtttttttttttaattcttgcttgtaaggcagggcttggtgactcctggtctcctccaatagcctaattttcctcccaaaagtaagcttttgattccactagggtgggcaagtatctttgtactctgccatttcagagataagagccaactgattttagaaatccaagagcaaatgaaatgtgcaacattttactcttggattgcttgagacygcatctgtatgcctattccctggagtgcagactgtcttgtgagcatttggtgccactgaactctgaaaatcagggcatgcagcatctgctggggaacacaatctggtttctgtggatcagaagcatttctctacacgttagagtcttaaggatttttaaagagagcaggtctactcaggcaactcgttaccgtccctttcaaccggagtcagaactaagaatgctcagcagatggttgtggagtgaggtaaatttacatgcagccttcagtcattagtgacagatctattttaaagggacgaggttgtgcaacaagggtacaaaggcagctcatggttctaattgttgggctccattagaaggggtctttctggagactgtggtttcttagagcaccgcagtctacccctgaatgaaaggcatcctgctggctaattaacttgcagcactttcttctctattgkgccttgattttttgttttgtttggttttaatctcagaccttgtttctagtaggactgatggagtcttccattatttcgccyaaatattttatgaagaacaragtttccaatcactcactcactctgatttcattacttttagcatacttttcgttcttataatctgcaataaagaggaagactattaagattcaagcttgtttgagcaagtacactgccagagcaaaatcagaggaattcatggaagactgggaaggtgcaagtaatctttctcttagaattgtgatggtaacatatgaaataaaatgtgggagcaaatgaagccattgaaaagagaggccattatacttctgaccacttgggaaataccccccaaaatagctgaaaggtcccaagaggctgggcacagtggctcacatctgtaatcctagcactttgagaggccaaggcaggcagatcacttgagcccaggagtcagagaccagcttgggcaacatggcaaaaccccatctctacccaaacaaacaaacaaacaaacaaacaaactagccaggcatggtggcaactgcttgtagtctagctacagcttccatgaattgttcagtgatgctctcttaactccatgatctatggaacaggcaggcagaaatggagagacagtgggtggaggggaggagcctcaratggcacagaaatctgtagcatctagatcagagtgacacctcagagtttcgagtaacgacaggcacctggcccatggctgggattgttaccagtggtgaatctgtgcaggtctgcagcaacctcaattcttccctcyttaggataaaaacttcattgaggggcataaagcagaagagactgaagcaagttttagagagggagtgaaagtttattaaaaagctttagagcaggaatgaaaagaaagtaaaatacacttggaagagggccaagcagacatcttggaggtcaagcacagggatttgaccttctgacttgggggtgtatatgctggcctatttccagcacttcacatcccttttcccttgattcttcctttaggatgggctgccgcatgtgtggtggcctgctagtgcttgggaagtgagcatgcrcagtgtgtttactggcgttgtacacatgctcacctgaggcgttcttcgggtgaatgcccccagaaagtcatgtaccagttaaactctgccatttggcctcttagtgcatatgtgtgagccccctgcscaactcctgggaccttatcgggaagctgataatcaccagtttcagatttttcctatttataaaaagactgcctttccctggagctggctgcaaccaattattttagagagacagttaccaaccacctgttcatcacttgatggtggcctgacattcctggttagggcggggggcactgtcctgctctgctcatgtctgcctacctactgtagcaggaccacaggcagacttttcttaaggagactcccagctttcttcctggtgaaggacccagagtttgtgagcccaggactgcagataatcaaaaatattaaattatggaagctaaatatttaaaataataactcataatggctctccaaatgtctgtaaaagsatttcacttaacaatasctggcaaatattatgtcagtggaaaatacagccaagttttggctcatccaaaatgttgtcatcaccgccactttaatatttaagagattaatgtttcaaggctcttccagaacattgtatttggagtctgattgaaagactcctcggtcctccctcattattctttatgtgtgactttggatgctctcaatacacttaaattgtatgtccctgtggggaatggttctcaaagtgtagtatctggagcagcagtatcagcttcacctgggaacttgttaaaaacataaattcttgcagctggatgtggtggcacatgcctataatcccaatgggagaccaaggtaggaggatatcttgagcttaggagtttgagactagcctgagcaacatagtgagaccccatctctataaaaaataaacaaaattagctggacacagtggtgtatgcctgtagttctagctacaggggagtctgaggtaggaggattgcttgaacccaggagttcaaggctgcagtgaactgatatcgcgccactgcactccagtctgagtgacagaacgagactctgtctcaaaaaaaaaaaaactgggggccacacaacagacatactgaatcagaagcctgggggtgtagctcagcttgtattttaacaaggcctccatgcaattctgatgtgccctccagttttagaattgatgctctgtgcaaatgaacaggtactggggcataatgatatgcaggactgttcttgagccaggctttgtattcatgaagtgggtgatagttgattggcattgtttcagtactcagtagctatgaagcattctattggtatcattrgtattaaatatggagcagaagcataactcatctccctcatggccacatgaagaaagatcagtatgttagagctgaaggacacctaaagccccaaacaactgccagagaccaaaatcatttgtctcaagaaatgttaacaccctttttgtgttcaagttttattatttctttactaaaattgcccattcacccctttgttttatttttcacacctaaaaaagtagccaagtttgaaaaagaaagagtgcttgccaccctttctgtccttaaagtgaaggccttgtctatctcattctgatctctgcccatccatcaccattcagcactcctgttgtgacttcgccccatctccaatcttacrttttattttcttggtacttttggtcatggctgtgttgatggtttcagaagaatacatagtatattaaggggtaacgtttacaaatgttcttgagagaactaatttttcccccttcatctcaaggtgtcactgcttaattattacggttcctaaataatctctatgatgtggttaactatccctaccttgcagaaatcctggaagatgagacggacctagcatgttgtgtgagcaacatctcttagagataatcaatttgatatcagcacaattattgtggctactattgaaatttctcttagtttcttagattagtactattggaactaatcrtaaataaccaatttacaagaaaatgagtctcattatattatagcacgaagaggatatattcaaggagatacacctttgaatctattatttcratatgcttataaaaattactattttaataaatttcccagtcaatcctattgtgtagaaaaagatgcttcactgcttacatattttaagatgagactgggaacaagcagattaatttggttgtgagactgggagtttatgagcaaaatgttcttctgtgcaaacgaagtagaagcttcatttcccttcccttcagttaaccctatgttattggatacgtaccaggtactagagattctctccctgggtagtctggcttagaatggctccccaggctctagccatctgcatagctgctagaggaaaaagctgttttagttggctccaagaatgtctctgggaattataatgtattcatagaaatgagtgtggagtgcccacttgcacaatggaagatccacaataatacacctggatctgatagcaccttcctgaacttgggccacttccctctttgaggtttgtgaggccaaagggatatacacagaggctgcctttgtttgtgattacctgggaattagatggggtatcattcccccttatatccttttactatagcttgttcacttttgaaaaggtggaaaactagactaaattctgtattgaaaatgtcaagtcaaatatgctatataaccaagaaatatcagtatagaatatcatgtattctacacaaagctacattttcaatataatccccgtaattatttcactcatcaaagaaatgtatccagctgagacataaaaccttagtcaatacattaagaaaaaaagaaaaaaaaaamcatttttttcccagtcatggggaccagattgtgtctattattcatcagggcctagcacaatgttgagcacatgctcaaggtggccaataaatccttgtggaattgagttatatgggagtcaattattcggtcacagcactggattaggaggttgagttcttgatagatttactttcagctgacctgtgtgacatttggtatttggttttgcaactttgttttcagttttttccatgcaccaatactcctagaattttgcttttgcctcttttcttccctttcatcttttttttttttctgtagaaagcatacatccatatagaagacctctctcaatacattccagatctgagttgcagtgcagcacttagcttagcttgtgaaacactccraagacttgattaatatcatcctatggagagatgtccttaagtaacttagaatggatcctttatttttccagtaaataaactctaaaatatgaggatttccaaggtgaaaagaaagagtacgaacccaagaaatattttaaatgaatcttgttttccgtccctgtgttctgagtaacatctgtattcacccctgcctttccattgattggaaacctttagtattctttgtactctcacagtcctagtttctcagaactgtctgtcccagtctaggcagttgtttcattaaacaaatgttattaaacaaataattttgagtgtgtgtctggtggggaggggaggctggggggttaaattcatgtatttttaggcaagagtattaacaagaattgtttgaaatatttctgaaaccatagtgtcataatgaaaataaaaataaggtggagactggattgtaattaacacagagcttttccatccaagacagagcttaaaggcctctgtttgttgggtcactttaaaaacaaaccctactgccagggatttccaatggcaactttaccgtgcttacccaaatggaggtaattaacaacccttctgtgtgttaaattaggtatccacagaattgggaagcttcagatatttattgtaaaccagagcctcttttcttgttaatctcctaagacagcagactagtgactcgcacccattagaacaaatgaactaagaaactgaatgacaggttctgaggcccctaagaagaaaaaacagagtctggattagagctgcttaacagaccactcactggggcatgctccctccccacgcccatttcctatcccagaaaataacaaacttcagatgacccgccaaaaacgactaccttttatatttgtcgttgaattatttcttctttgtttaaaattaaataatgcaagtgatttttttgctttagaaaggaggattacctcttcctagacatccagttgaaaaaccaactggtatagaagggaaatgcatctcaaacagatacaatgacattcttataattgcctcatttgaaatggcagcatttccccgtgctaattrtcatccttcagctaatttggtacattaaaggagattgttattaaaaacaaaattaaatccattgccagcatctttattctctaccagaagaaaaattttaaataaatgcaaatacgccagttttgctcttaatgttgcctgaagttgaaaggatgaactttgacttgaaagataatgagttccccctgttggaggatytgaggtttgggttggataatcccagatgatgttggaatagacagaatttaaggttccttctaaccctgaaattctatggttataaaatctatccttttcttgaaagaagaaatattaaaggtgttttcaaggaaatggtagcataatgaaaaaggaaacacaaaaatgatttttttttccttaataagcagtcacctcacttggtaatagtttttcttcttaattgcttgtttgtttgtaacaaatgcggtggtgtaatcaagtggcttttacaataataaaacacttctctcaattaaactgtactgcaaggaattcaaagatgaacagaagtgttccttcttttaagatgctgatttataagcatccctttaaaatttacttctctttctgatgataaaagtaatacaygtttattgtagaacatttggaaactaccagggactataaataacccatagttgccccaccagagaatattcttaatatttttggcatatttcttccatatatctattcatattcacattcatactaatttgtcatattctaatttaaccctctctttaatgtttataatgtgattatactactttttaacacatgaattgtctccaaataaaagccaaagtgatccatttgttaattttttttaatcctacccagctgaaatggacaaagaggagcccatctcactcgggggaggggatcaaagagttatcctttctcttgatcaattctgtagcaatcagccatgataagaagcccaaattaccaaattaacaaaaagaattttatttagtggccatatataaaagctaaatggacagttggagacagacaacaaaaactaatataaaactaaaaatgtgaaaattcagcatttaatgaaaatgagagcttagaaaaactagcatccagatttattcagactgaatttctgccctgggaaattaatgaatcatccttcagttcccttttgtgtctgtgcatccagcctcattgtccttggtagtaaattatgtacaccccctgtttccaaatcttcaaatacggtatgcgtcataaagtcacaaaatgtgtaatttgggtcctgtatacaaattctagccagggaatggcttgtagtcatgctaaatattctttacaagttgtgtaacaaagacaaagaaaactacaaaaaaatacagagaaacataaaaaatttcccattccttctgtgattctgatgtatttccctttgattctttgcttctacattgaaatagacttagtgggtaatactaataattacagttaacagtgaccaggtgatatggtttgactaggtccccacccaaaatctcatcttgaactgtagctcccataattcgcacgtcatgggagggatcccgtcggaggtaattgaatcatgggggaaggtctttcctgtactgttcttgtgatagtcaataagtctcacgagatctggtggttttataaaggggagttcccctgcacatgctgtcttgcctgccaccatgtaagacgtgactttgttcctcttttgccttccaccatgattgtgaggcttccccagccatgtggaactgtgagtccattaaacctctttctttataaattactcagtcttgggtatgtctttgttgttgttgttgttttgagacagagtttcactcttgttgcccaggctgaagtgcagtggtgtgatctcggctcactgaaacctctgcctcccaggttgaagggattctcctgcctcaccctcccgagcagctgggattacaggcgctcgccaccacgcccagctaatttttatatttttagtagagatggggtttcgccaygttggccaggctggtctcgaaccctgacttcaggtgatccacccgcttcagcctcccaaagtgttgggattacaggagtgagccactgtgcccagcctgtttggttttgtttttgttattgtttgtttgtttggagtatgtctttattagcagtgtgagaacaaactaatacatcagaagttctgattttcatatcagcacagagaaaagtgaccttcccagtccagtctatcgtattctcaaattactttctctaacttgtgaaataagatcttcttggtgaactttatcagacatttctgaacagaattaccactctgtggtggcctgggtaaatgtaatatatttataataatttgaaaagattcctccaggacttttacaaagacagatgatattaaactgaacaaatagtgctaggtaagaagtaaattgttcaattttttcacagaagccctgtagattttagcaaaaccccccagacacaatgtcaaatttctcagcaggtttcttggttttagctcttccccttaagcagtagttaacagaatattagatgtkagtaaagttatttctttgttattctacctgggttgactaccagagaaaatccctgaacattttacaaattgctcaacagattttcatctaaaactagaaaagattggccagttatggtggctcacgcaggaacattgctttagcccaggagctgaaaaccagcctgggcaatagagtgggacccccatttctaaaaaataatatcttttaaaaaattaactgggcatgkcggtgcgtgcctgtagtctcacctacttgggaaactaaggagggaggattgcttaagcccaggatgtcaagattgcggtgagctatgattgagccactgcactccagcctggaggacagagtaagaccctgtctcaaaataaaataaaataaaattagaaaggataggtgtgtktgggagggagactggttaaycagggtgcatgggattatgtagggcttgtctttcatttgagttcttctctgtctttttaaaatgactgattatatatattaggtcccaatggcttcattatcactattattttaattcataggttaaattttataaacatgaaaaataattgacaagcctagaatctcttttctgtctatattagaaattaaattatatttagtakttaagcaatacatgcatacatctcatgtaatccttactgtaattaaggatgaaattatgtaacataggaaaagcagatgtaagttctcattctccttttacacataaggaaattaattcagacttttagtaagttgcccagaatcacgcagctagtaagattcagaactaaaaatataatacctgtcttctaattcaaatgtttcacatccaagtgcccatatactaataatttttaactcttttgttggggttaaatgagataaaattgagtcttattgtatagaatttatcagaaatagcaaaatttcgcccaggcacggtggctcacgcctgtaatcccagaactttgggaggccgaggcaggtggatcatctgaggtcaggagttcgagaccagcctggccaacatggtgaaaacccgtctctgctaaaaatacaaaaattagctgggcatggtggcaggcacctgtaatcccagctacttgggaggctgaggcaggagaatcacttgaacctgggaggcgggggttgcagtgagccaagactgtgtcattgcactccagcctgggcgacagagagagattttgtatcaaaaaaaaaaaaaaaaaaggaaaatctctaaaatgatacctaaaatgataaacaatttaaatttagcataattatcattttttaacttacagattgacatatttctgcaagtgttttcagaggcattggggccacagaagtccaagtcaaggcaatttttggtactaaacagttgacttttctctggtccacatcaaagctgccactgtgcagagaactaacaygtgtaygtgactagtctagggctggaggaacatgcgaggggactgttggaaaggaaaaacttttgctcttcctctaggttcagtaaattagggactgtaaacaataataatgaaagattaataagaggcacacaattttattttattttattttatttacttatttttttgagacagagtttcrctcttgttgcccaagctggggtgcaatggcacgatctcggctcaccacaacctccccttcccgggttcaagtgattctcctgtctcagcctaccaagtagctgggattacagacatgcatgaccatgcccggctaattttgtagttttagtagagactgggtttctccatgttggtcagcctagtctcgaactcctgacctcaggtcatccactcacctcggcctcccaaagtactgggattacaggtgtragccactgtgcccggccccacaattttattaatatttatatgcaaaagagcttgtagaaaatcagtgaaaatcaaagaagtggttagactagggggtttataaacccttcttaaccaaggaaagagggtttgggcatcaatgagtggcgaattgtggagaagtgactagaaaatgtatgagagaaactaatggaaggtatattagttcattctcaagctgctataaggacatgcccaagactgggtaatttataaatgaaaaaggtttgactcacagttctgcagggcgtggaggcctcaggaaacttacaatcatggcagaaggagaagcaaacacatccttcttcacatggcggctgcaaggagaagtgctgagcaaaaaggggaaaagccccttataaaaccatcagatcctgtgagaactcactcactatcgtgagaactcacttactatcatgagaacagcatgagggtaacagcccccatcgttcaattacctccgaccaggtcccttccatgacacatggggattatggggactacaattcaagatgagatttgggtggggacacagccaaaccatatcagaaggtaaggcctattttagtaagttttgtttatgcaaactcatctcagtgttgactccctatctttataacatgggtcacttttttcttcctgatggtgtgggggagagggcacctatctcaaagagaaattttgctctgcttttagatgtacaagggaaagacagagaactgttcctgcatccattgattatcaattgccttcagctcaaaataatccttatgccaaagtagcatattttggggtggcatatttcaacctccttcatctctacccagctggaactgtccagggagttgcatacctcaaaagctgagttggtggctataaagacaagatttgggttagttcctgagaggtaagagacctgcaaagggaaagaacatagatcagaacgagaataaataagcagaaaagagcaaatctcagcacattcccactgatctcactaaaccaggctcctagtactggaaataggtcagtcaacttcaacaattgtatctcatttcaggaagcagcatgcaggtgggagtggggcacccctctgaagtttggcctttatgctatgtgaataatcacacacttaaagagaggcatttctatgaaaacaaaagaaaaacaaagattaacagttggagcagactctaaagccagtttttgagtccagaaggcagttagttggcaagatttctaaatgttggattcaaggctgggtgcggtagctgacatctataatcccaacattttgggaggctcaagtgggagaattgctcgaggccaggagttcaagataaacccgggcaacacagtgtractccatctctaataaagtcatccaaatgtagttgtatgcacctgtggtaccaactactcaggaggctgaggtggacggattgcttgagcccaggaggtctaggctgcagtgagccatgatcacaccactgccctccagcctgggcgacagagtgagatcctgtcttaaaaataaataaataaataaataaatgttggatgaagtgtctttagatggtggattgaggataacaggggcagtctcagtcacgtgcatttcccggagtttgaargaacatgttctggtgagcttcctgagtggtccaaactacggtagtgataattcctttgaagttaggttcagttgtccaacttcagcttccagggctccaagaaaagggcaattgtggttctcagtgatgccaagtcacaagggtgagagaagactggaaacattaattacaagatggcaggattcagtttataaaggggggaaatatctcaatgataatgaacattcacaagggtgggttatagttttccattaaaacataaaatttctttctacaatcacccccaatgtgatcaaaaacaatcaaagtatgtctgcttgtgtctggcaactgagtctagtctcattaaacttggccagattatttacataataagtgcagcaagaatagtaatttagcacgtaggcttttttgtgtttgctcttctggaacttttaataaggactctcagaatagacttttaaaagctcttgagagtagtaagccaagccaagaactagccattagactttatctgtaatacctatagattggggtgaatttcccttttcttgaggactctaaaacattctgagtttcccgggcctgccagaaagttaccttccttacccacctgtaaggctaggaacgctataaaccagatacgagtcttacttttccaagggagctttgtaagcgttggtgccatatagtcaaccttagttccttaaaactattgggttatatgtgattccacacacattattttcaaacatgacactgcagtcaaagccttagtaggacagccaatgtttccaattgtgttctgttccaaggagaatagattcttatggaacttaggcaaataactatattgccatgaaaattgaaatactcaataagcatttctgaattttggagagatcaggtaggggcaaaagataaatatttcatttttgtttatgaagacataatctattaaattattgtgaattacaggtagcttttagaaagggtttcctgacatccagaagatagaacattaaataaccagcaaggtttcaatcaaaaaggccataaaaattataattgttttttatcagttcattcagtcccatgtaattaattcttgttttgcttgatcttagattagtggatttatgaatccatcagcttctccattagttctggaaatccttactgtgtccagtgttataatcttgaagttatttaagcaatgtcagcagaagcctgtactccagagtacctgccaaggttttgttcatgaatctctaatatgctctttctttgctgaagatgaggcatgctggcctacagctgactgcgtgagccttcagaaaagcatcggcataaaacaataattatctgtgaatgacaatgacttaaaatggccatacctaaagatctgatgarwgttcattataagtcaattgataaagaaatttggtygtttctctgacatacaggattttaagataataatgtgataccaagacatctcatgaacagcaagggcaytgacagatttctaggaattttatatgatttctgaaaaatcaaaatcattatatccatacaaatataacccaggaatggttaaatatcttctctttatttgacagtgcttcccatgcaatttagcatattaaataagctcatctctctttttacaaactgagagaacaaatcctttgagagttttccaggggccctctgggaaattccagagtcaattcaaggtcaagaagacttcatttggaatttgatttagggaagttgtgaaaaacgtgaaaaggtttgaacaattgattaaatgggatcacagatcactataaaacaatacttagttatctatttaaccaaagtgacaataaaagattttcaagataaatatggaagataacataatcataaaaaattttaactctttcaatcttaagaaaacttggttttctgaaataatcaaagacataataagtgcaacataaagcacagaatatttattttctaggtgtatcactcaagaggtaaagaaaacatttcataatctcttaccaagaatagactactcggtatagtggctgaggcctgtaattccagtcctttaggaggctaaggtgggaggattgcttgaggccaggagttcaagaccagcctaggcaatatagtgagaccctgtctctctaagaacaaaaaatagattaataaaccaagaaaacttgctcattttaaaagtagttttgcatcaatacactactgtattagtccattcttgcattgctgtaaagaaatacctgagattgggtaatttacaaagaaaagaggttgactcrcagctctgyaggctatacaagaagcatagcagcttctgcttcttgggaggcatcgggaagcctccaatcatggcagaaggtgaaggtggagtaggcgtcttacatggcaggagcaggagcaacagagggtaaggggtcaggtgccacacaattttaaatgaccagatcttacgagaactcggtcactatcatgagtacagtaccaagagggatggtgctaaaacgttcttgagaaatctgcccccatgattacaatcacctcccaccagagcccacctccaacactggggattacatttcaacatgtgatttggtggggacacacatttaacccatatcaactactaagctcattctttaaaaccttataaatacacccattcagtcctagccagcgtggccacacaatgtaagattctctctctcttctgttctctctctctctctttcactgacctttacaactttctatatcaactcacatttttgtcctttattttcgtctttcttatttaaatgacctctaaactactctaggataaaagtcactgtcatttttctttaacaaaaacacatctcactctccttgtackctttgcctgcagagttttgtttcttcatcctattattactagtagttcatttacayatatttattagatttcttaacccttagtaacattaactttcagtgaaaatgaagaaataaacaatcataaactgtcagttacatacatgcattctgtgctacattagcacaggtataaatacattctctcataatttctagaggcatgtttcctaacagtacaacttctcagtgtggcaaaagagcaggtttattaacagatccaaatacctttagtctctgccaaattaagaagtcaaaagtagccgggcgcagtggctcacgcctgtaatcccagcacttcgggaggctgagaygggcggatcatgaggtcaggagatggagaccatcctggctaacacaatgaaaccccatctctactaaaaatacaaaaaaaattagctgggcatggtggcgggcgcctgtagtcccagctactcaggaggctgaggcagaagaatggcgtgaaccagggaggcggagcttgcagtaagccgagatggtgccactgcactccagcctgggctacagagcgagactctgtctcagaaaaaaaaaaaaaaaaaaaaaaaaaaaaggaaayaaacttaaatagataaactttagtaattagtattttggtattttattttctttgaaattatctacctatttcatgaatatccgtcatttaacttagtataactttaagatttcaagtaaccaaaaagatgtcggaaactatttttaagtcactgtactataaaacagttattgttgaaataaagtttgtcagagtaatgactcaatctgaataaaatgccatctataagtttaatagccttaaacctcagtagttataatgttagtttgactagtaagtccaagtagaataaaatgtatatttcatgttgacaacttgaagacgtaactctctttaattaaagaaataatattaaactggtagtagcggtgaatccatacgggtatgcagcatccttacatcttgcctccttagaagaaagagttcagctgacggacatacgcagagtgagagaccgaggcaagttttagagcaggaatgaaaggaagtaaagtggaagatggccaagcaggcgacttgagagatcaggtgcaccgtttgaccttctgacttggggttttatacgctggcatgcttctggggtcttgcattccttctcgcctgattctttccttggggtgggctgtccacatgctcagtggcttgccagcacttcaaagggtccgcatgcacagtgtgtttactggacgtgtacgcatgcccacttgaggtattttttcccttagcaaatccagtgttcctagaggaaggtcatccgccattttgccttttagtgccatgcttgagcccacttacccaactcctgcgatcttagccggaagctgctgatcagcagtttcaggctcttcctatctgttgggagcctgcctttccctggtgccagctgcaaccaattattattttagagagacagttaaggactgcctgtccatcacctgatggtcgtctgacattcctggttgtggggaaagggaacmctctcctgccctgctcatgtctgactagctacctgctgtaacaaaactagttttatttaccaaagattatcttatatcagataaacttgaaaacatgttggttatatttaaccattaaataatatatttggttatatttctgagtgttttagcaatacttataagygtttttttaagccaacttagaatagaactcatttattaatttggtaataccatcatgaagtgaggaaatgtcacataggtacaacgtacatacatatatacacacataaacatataaagatttatttattttaaaatttaatttatttaaagacagaaacagatagagattattttaagattttagccacaggtcaggtataaatatagaaacacaaaactcacaaatttatatgagctggcatttttgtctttttaaaaaaatctgaattgtatttctggcagatggaacaagaggttacctgctcaatgagggttaaggctttttatcaatattgttggtggagacttaaaaaatttttttcttgacataataatttaatgtagacagtagcattagtctcaggttattgttttagtcaacagaaattaaagccaggtgacttttgggctggaaatcaaagttattaatatttccttaggtgtttacatatcaaagagatggccctcaggtccttgagaagacagttttgggtggtagaatattttacagctgaaggaggaagagaaaggatgtaaactttcaagtagtccctttaaaagggagttttcgggcatttttgtctgttacagggttgctgcgtatcattgttgttattatcaattgttattttctgggacaaacagtaaattcttctggtagcactaagctttrtcaagcaggcattttaaaagtggggttggggggatgatttttgatgggtgtgaattttaagttcttgtctaaatctaatttatgcttgttaattttgttaagggagctatccagtctaaccatgatacacttgtttccttctttcaacttgatcctcccataggtagcaatacgatgtttatttagggtgagagctctctaaatatccttttaaacataaaagctttttcaaatcccagttccatcatctggtctttgacaatttaggatctccaaaggtatacgtgctccaaaatgtgacacaaaaccagtaagacttttatgactcaaaaccaatcatccattttatggtttaaccggggaccaagagttgtccccagagagggtgcagaagactctgccctcatgatggaaagtcattcccaaaaatagccaaagagaaagcgagctgagaccctcatggtcacaggcagcaaaaatggtgtttgtgaaaatggtatctccagcgttacacaaaagtgaggcacctgcaatcacagacttgtggacctgtgacacttgggaggcaatacggagatgggactttttcagcmctaataagacaatgaggaaggacaacaagtgccttgtatgagctgagacactttatttagacaaattccccagattgctgacatagccaggtgggaaattttgctagtgttttttagggtccttgactgacagcgagcacctccagactcaggcccaaccacctgtgcttcccagtgggcaaaaacacagacagaggtgaggcgtggtggctcaagcctataatcccagcactttgggaggctgaggcaggaggatcacttgaggccaggagttggagaccatactgggcaagatagcaagaccctgtctctaaaaaaaatttaaaaattacctggacatggtggtgtacatctgtagtctcagctacatgaaggctgaggcaggatgattgtttgaccctgggagtttgaagttacagtagctatggtcgcaacactgcgctccagcctgggcaagaccttgtctctttaaaaaagaaagaaagaaaaaacaaaacaaaacaaacagagcatgctgttactagatctaagtcaagttctcgggacagaagggaggacttcatcgaatttcttttttattggggacccacaacaacatttgcccaaagggtctgtagtctgctgagaactttaaagtcaccagtctgtgaggctggctcaaacaacaggcttatacacctgtgccaatattctattctatgattttcctccttatgacaaacaacacaaaagacagagacaaagagaaaacaatggctgtctccaggaggaaaaggattaatcacaaaagtcctcaagccaaaaatcacaaaagtcgcaatacccaaagaattatttcttacaaatgttttctcctgccaatctaaatttggagaggaaaagacaaggaaatgctcatactgcactccctcaaccaggctctctgcagaaatcttggggggtatgtggggggatctttttgactgggcatggtggctcacacctgtaatcccagcactttgggaggctgatgcgggaggatcacttgagtccagaagttcgaggctgcaatgagctgtgattgcaccaccgcactctagcctgggcaacagagtgagaccctgcctctaaaaaaaataagataaaaaaagcagtttttcaagggtgtacaatctcctacagcattctatctattctttgattaattaccctcaacccatttagccattaatttattgaacaatgtattagacatccacttcgttccaaagactctactttagggttgaaaaaaacctaggggtgaacctggcatggtttttgccctcaaaattcttaccctatgatgggagagagggaagatatgttcatgattaagctctaagtcagaatggtgaaaaaaatcctttatagaagtacaaagatggagcatgcctcttactaaatagttgtaagagcgagcaagagttactaaagcacttcaggttaaggggaggcagagggtaaggcaggttagtgatagggtacttgtaaaatctccaaagcatgaaaaattttctaatgttttgaagtagcagaatataaagtttgtaggagacaatgtccaaagaagagactgaaatggtagtttgaagccagtctgtgaatccattgaatggaacacttcacagtttagttgcctcttcttgattacagagacttacagaggcatttcaactggaaagtgtttgatctgctttgttcatttgaggaaacaactttgctggctgtgaaaaatgataaacagcatgagggagaatttgctggcaaaaaacaaaacaacaacaaaaaaactaagtttataatgcaacagtcccattaaagagtaacatgaggtgcccttatatacttttagtggcaatgtataacatttggaagtaacttggtagtacttattaatcctttgcaaatctttgcccaaatgagtgacagggtctcactctgttgcccaggctggagtgcagtggcatgaccttggcttactgcaacctccacctcccaggttcaagcaattctcatgcctcagcctcccaagtagctgggattacaggcatgtaattacatgcctggctaatttttgtatttttagtagagatggggtttcaccatgttggccaggcttgtctcaaactcctgacctcaagtgatccacccaccttggtctcccaaagtgttgggattacaggcatgagccaccgtacccagactacaaaaatgtatttatggggatgttcaatgcagtagcagctcatatgtccattcatagaagatgggttaaactctgacgtagctaaaccagctaacacttttcaaccattaacaaagaatggtagagtggaatgtggtggcacatgcctatagtcctaactactcaggaagctgaggtaggaggactccttaagcccaggagtttgaggtcaacctgggcaatatacaatatagtgaggccctgtagagatctataatatgttctgctgtaaacatawgtccacaatataagggccatttttttttttttgagacagagtttcacactgtcgcccgggctggagtgtagtggtgcgatcgctgctcactgcaacctccacctcccaggttcaagcaattctcctgcctcagcctcccgagtagctgggattacaggtacctgccaccatacccagctagtttttttttttttgtatttttagtagagacagggtttcactatgttggccaggctggtcttgaatgcctgacctcgtgatccacctgcctcagcctcccaaagttctgggattacaggcgtgagccaccgcgcctggcctaagggctattttttaagttgcaaaacaaaaacaaagttttaacagttgtcattctgatatgtagaattattaggaaacctacactatttattttttatacttgtatatactttgtggttttgttgttgttttggttttttgtttgtttgtttgtgtgagacagagtctcactccgtcactcaggctggagtgcagtggggcaatcttgggtcactgcaacctctacctcccaggttcaagcaattctcaggcctcagcttcctgagtagctggactataggcacacaccaccatgcccaaataatttttatattcttagtagagatggagtctyaccatgttggcaacgctagtctcgaactcctgacctcaaacgatttacccacttcagcctcccaaagtgctgggatcacaggtatgagccaccgtgcctggcctatacttgtgtatactttgaattgtttcttttttcttttcctattttattttattttattttatattttattttattttattttttgygacagggtctggctctgtcacccaggctggagtacagtggtgcaatcatgactcactgcagcctcaagctcctgtgctcaggtgatcagcctcctaggtagctgggactacaggtgaccaccatcacacccagctaatttttgtattttttcatagagatgaggtttcaccatgttgcccaggctggtctcaaattcccaggctcaaatgaacctcccacctgggcctcccaaagtgctgggattacaggtgtgagtcaccacatccggcctgaattgtttctattattcacatataactttgtaatcttaaaaaaaatacttaagactttaaaacaaagatgattagagcctggattaagctagtgtcggcagcctgaggagggaaggttttggatgccattgccaaagtagattgaagaggaattggaatttgagggatgcaggtgattaaaggagagggggaagagtcaaaggtgacactcacatttctagcttggtaaattggttgtttgtttattccattaatagaaatagagaaaagagacagcagaggagggcttcattgaggaggatgactttgttagtttcattttggatttaagtctgagggtcctgaaaaggcagctatatgtttggcttgaacctctccactttccaccttctcagtaattcattaatattttggatgtcctagcctgttgatgtgtgtgtactggaggtggtggtggtgggagctaatatgtttagaagttaacatttcatctgtctttatccttttactctcctttcattcagaccctacaattattgctacagggaagaaatgtggccttgcctgtgaaaatctagtttttggaattttttttgcttgttttccccctaaaatttagctccaaaagagagaagattcttaactagtggaaaaaatgtcttggtcagaaacaggagaaagaacatagctatcctagacaaaaataataataataataataataataataatcataaaagcaagggagggagggagaaagggaaagaaagagagacagaaagaaaaaagaaagaaaagacaggaaaggaaagaaaggagggctaggcatattgcctcgtgtctataatcccagcactttgagaggctgaggcagaaggactgcttgagcacaggaggtcaaggctgcagtgagccatgtttgtgctgctgcactctagcataggtaacatagggagaccctgtttcaaaaaaataaaaaataaaaaaaggaggaaaggaagaaaattccagtagaataaagaaaaaaggaaaaagaacaatatttacaagtacctgcagagagaaggtgagaagatgaagacctgttttctacttttttgggcagcactgctaaagaaataaaaaagtacccagaagtcgcaggactctaataaaatggaacatcacctctattcctgcctgttctttggaggagtagaaggtgaggaaatggggaagtgcaggatgagtgattctggagaagacatggctgtgctcatgttgggctgatgatgtcactgataactaaaacaaagggctcagccaggcacccagaagcctcagggccaccgcaccctaaggaccatgcaggctgagacaggactcttttcagtaatccggaagatggctccaccctctctagtccaggccataccctgggccatacccttagcagtgctacccaaaaaagtaaaaaacaggtcttcgtcttctcaacttctctctccaggttcttataaacattgttctttttccttttttctgtattctgttggaatcttcctttctttctttctttccttttttttttttttttctgaagcagggtctccctatttttttccatgccataccctgaaaaaaatctctggggagaggatcccaaagagacaaaggctaattttctcaccatgcttatagattaggggctttgagaaaatgagggtatgtttttaaagtattttaatagtggactgatctattttacctcctggaccagatgaaatgggaactgttccaattcatggagcaaccagacatacatgttcaaayaattatgaaaaacatacaacagatatttatcaacaaatacatcagtaaacaaacttacatgaccctgcttggccatcactgtttcttttcaacacacacacacacatttacaaatacatatatatgtgtgtgtgtgtgtctgtctgtcgatatatatgtgtatatatatatatatatatatatatatatataaataaaataaataggtaagagctgcttatagccctgaatccccacagaaaaccccgtctgtctttagtttcatgaaagcattgtactttttctcattatttttcagaccatcacagacacttctgatcagtgttccacttaagcttagccccaaatacacagaggaattttatactgaaagttaaagaagcgacagtagttagattatctcatgcctcctagattggctggctttgagcactttttcaaagtgtgtaccaactagggtttgtccaccaagttgcaatggcttgtatttgagtcagccatacgtgctcatggataaaaacaataagaactctttattaatataaatatactctgtgaaggcaaagatgtgctttaaaggaaatttctgagcatgtgagaagtagatgagttacatgaggttaggagcatgcagctgtgaccctaaatggggagaatacagccccagggagctgtgatgcacggccactgggaagctaatgaaatgggcagagccaggaccagtggggtagaattaaggcagaagcttccctcttgtgctggacattgtgctggtctctttcctgcccagcacatgccaggtaggaggctataatgtgatcatgggtcattccatgccacaggaatggattggcctgagctggccttcttcataatccaggaataaggagaagaaagaggtaggacagaagatggtcctttatgggggatgagggggatggaggggggaagcttctagaggaattggaattttcacagaaagacatttctgcttagatactaatacagacgtacatatttggacaatatacatgtagaataaaaattatttgaattacttcaacaattatgcctacttttcaaaaggctttgacatcagctatataatttagccatttggcaatattaatcataacttactaaactaaatttgacattgggataacagaatggtaaaatgcaaactgaaatcatagctttatgatcacatgaatttccttcaacagctgttcactgttattactacttatacctttgttagcattccaagaggatctgataatcatagctagcattgattgagcaattattatataccagacattcttctaagtgccattatctcatttaccctacataacaaccttatatggtaagtatcttttcctagtgccttttattgatgacatgaatgaggcacagaaaaaataggtaacttgttcaagtccacacagctagttagtggaagagcaggaattgaatccaggcagggtggtttcaatacttcagtcttagacataataccatattgccttcctggtacaatggatgctttacgtaggaggtgttatagggagaaattcccacattttcctttttatacttgtatattgtttgaatttgtttataataaggatacatctcttttgtaacttgaaaaccacaaagaagaaatagaacaataaccccattcctttaaaaatagcattgcagtagctatttcaggtagtgagatatcaaactggttttaacttttttgtttatttgttttagttttaagaatatccaaacaaagacggatacatgtgaaaacttgggacagtaaaattgtgacctttctataaagacaaagaggtaggaatcaagccaaagtgagattaggataatgtcaggtcttagtactctattctgcataatagtttattttaggtaattctctatattggttggcttgctgaarctggtgtgtgtgtgtgtgtgtgtgtatgcgtgtgtgcgtgtgtgtgtgtgtgtgtgtataaaaaatctttttagtcgttcttttttatttgtgcttctcaacatgcttaagcaagtgatatctttccatataaggggcaaaagaatttggggctgtgaggcaggctgacaaagaggaaatatatcctgtctaagcaagcaagaaaaagggaaaggagtgaaaattcttgcaacatttagctcttccgaaaaaaaaaaaaaagtggtcatgatttctcctatagtagttgatttgtcactttacacaaaaggcctagaaacatatccattatagatatgcctccttggggctcagcctctatctgtcaagtaggggtaatgggtcaatggaattgattatgtgatctataaactttgttccagctttaccatattgtgaattttgaggtttggtcaatgaatatgcaaatccaaccagaagtatcattggatacaaaagtatccgtatcatttttgagaataaaatttccaacagcatttttatatatatcagtgaagatctgtgtcacaaaacaaaactttatgaaataggaaataatctggctgatctttgacagtacaaaatttgacattccaagtcaaattttatgtttaggtagaatagggaagtattggttttgcagttttaccatatcaacacatataatatttctgcatagaaaaacggaccatctaaatgggaaaggggagagccaactagtgggtaaaatgctgtaacagtattttaatgctcaaggcccaattatgacttgaagatgttgttgtactgattagcaatactaactgaaaatttttctaacaggttcataacctaagtattttccagctatatactgttggtctcagggattggcaaagctgaatcagaacacttctttgccaagacttgtctgcaaattcttaacctttttttgtttgccaagaacaaagaaaaattgttgtaaacttagctgctgctgtaacatatgagcagtcttttccgaaaatgcaaattagacaaacaagaatcattacatcatttgcagaaatgcagttacatttggtttctgctattgtgtgtgtatatatatatatgtatatatattactttcatatcttacttgataccttttgtagtgctttaccattttcaaagcacttgcatatgtgtcgtattatttgatcttttctgagatccaaagtttttaacatgcttcatgcttgaaaactttgatacttcaatttatatgatgcatgtaacatacaacaaatgttttgattatggttgtatggaaaattcttattatatccccaaatataggttacacattttggcaaagtaagcagttattgatttttattgccacatgaactggattttcaaatattaccaaatgcatgtgtttttgtttttgtttttaatacaaaaacatcatctaatggatagtgatttatgccagtatgtaggaaataagcaagtattttgggtcaggtggattactgctgaagctttgattaggcttgaaaatttgatacactggaaagctaactgttaccctatagattactaacaaactcattgcttcaaataaaactgttattgattgttcagattaaaaaaataatgtcgacttttgttttagattcagggggtacatgtgtaggtttgttacacaaatatattgcataatgctgaggtttggggtatgaatggtcccatcacccaggtaatgcaagcaacatgattttattcttttttatgactgtgtagtattccatggtgtatacatatcacattttctttatccaatccactgtttatgggcacataggttgagtccatgtctgctattgtgaatagtgctgcaatgaacacgtaagtgtgtgtgtctttttggtagaatgatttattttcctttggatatatacttagtaatggaattgctgtgttgaatagtagttttaagttctttgagaaatttccaaactgcttttcacagtggctgaactaatttagattcccctcaacagtgtataagcattcccttttctccacagcctcgccagcatctattattttttgacttcttttctgactggtgtgaggtggtatctctttgtggttttgaattgcatttctttgatgattagtgatgttgagaatttttttcatacgtttggtagctgcttgtatgtcttcttttgagaagaagtgtctgttcatgtcctttgcccagtttttttgttttgttttgttttgagacagggtctcgctctgtttcccagaccagagtgcagtggtgtgatcagctcactgcagcctcaaattcctggctgaagcaatcctttcacctcagcccccaaatagctggaactacatatgtgtgccaacacacccagctcattaaaaaaaattgtagaaacaaggacacagtatgttgcctgggctggtctcaaacttctgagctcaatgatcctcccaccttagcctccagaagtgttgggattacaggcataagccactatgctcaggcctttgctcactttttaatggggttatttgttttttgtttattgatttaagttctttatagaatcttgatattagacctttgcccactgcttagtttgcaaatattttctcccattctgtaggttgtctgtgtactctgtcaattgtttcttttcctgtgcagaagctcttcagtgtaattaggtcccacttgtcaattttgtttttgttgcaattgcttttgaggacttagccataaattatttgccaaggccaatgtacagaatggtatttcctgggttttcttctaggattttaaaagactgggatcatatgtttaaatatttaattcatcttaatttttgtatatggtgaaaggcagcagtccaatttttcttctgcatatggctagctaattatcccaataccatttattgaataaggagtcatttccccattgcttatttttgtcgactttgtcaaagatccgatggctgtaggtgtgcagctttatttctgggttctttattctgttccattggtctatgtgtctgtttttgtatcattaccatgctgtttttgtatcattaccatgctgtttttgttactgtagccttatagtatagtttgaagttcagtgatatgatgcctctggctttgttctttttgcttaggattgctttagttattcaggctcccttttggatccatatgaattttagaatagcttttctaattctgtgaaaaatgatgttggtagtttggtaagaacagcattgagtctatagattgctttgggaaatacggccattttaatgatattaattcttccaatccatgaacatggaatgtttttccatttgcttgtgtcatctgtttgtttctttcagcaatgttttatagttctctttgtaggtatcttccatctccttgcttagatttattcctaggaattttaacttttgtgtggctattataaatggcattgcattcttgatttggctctcagcttgctgactgttcagattattgttttataaaagccacaaaaatgttccattagctaaaagtcacgtttcttagttaatagaagtcatagtacataagaaggtaagagtgtcaaattattactagttgtgaatgaattattactagttgtgaaagaatagcaattcatggttttgtttggtcagcaactactgcaccctagtgatgatgaattctctagcagattggaaagatacttagggagggaaaaaagatgactttattaaggatctctggaaataggaaaatatttaagaaattctataagtaaaaatgagtaattttatgtcagaataaaataaaatttggctgaatttatagttctccatctgcctgcttgcacctatttggggcttattttacctttgtggttaccctgagaagcatggtatggctggagcctaagtgagttctttgttttccaaccacattgtcctcttttctttttataaaatacatcaaattccttgcaggtttgtctgtctggagtacttacccaccttctttacttagtaaagtactacttcttttttaggtgtccatttaagttcaaatccttgaagaacttttattttgtaataaagattagattcatatctcctgttaaacactcttatagtattcaggatataccttctaagtggtacatgtggggcggccagcagaagaagattttgtattaggtatcacatttgagaggaaggaggccccgtggaaaaagcttcatcaaaagaaaacaaaagaggtgtttatatgtttctcaaaaggcatgtatctatgtgttggtgaaaactgccttaataagtattacatgtctaatgtgtgtatactaacatgcagctctacgaaatatacaaaaaagttaagcatatagcctatgcttttgaaagcttgagatatatttgngggaagtaactatgaaggggatgtcccatgtagcctcatatggagcataaaataatgaaatgctatttattatatgtcatgtatgggactggcctgtatggggtcatttgagtgctaagacaagatttctttaatttgcagtactttcccacaatattcatatgagttaatacattatacttaggaaattgcccctaagataattaaattaaaaatatattaccatattaacatgtaaacacaaattggtttaaatgttctctagcaaagatcaaatctaggacagagaaacaggagaagaaaacaggaaaatggggctcagagcaggggaatgctgtgttgtttaaaagccctggatgtcaagatctaaggaaaagataaaaaaaatagaaccaccaccaaatataaatatttatttccatatctcacaattttttcctaggccattgctggtgacagactttccagtccttttcagaacttactcatcacatccttttcatgcttgttattttgatcctgaacatccttgcaattcaaagagcatacagaggcagagtgaaattagcataatgtcacctattgctatgatgctcgttacctctacctccagaacatgccaaggaggcttccaggagccccagaaacacagaacagcaaatcttcaaaagcccagtgcccagagcagatagagaagaaaattctattttgaaatccataaagaatctcataattccttgcaatatctagtcccaattgtgtgggtgacaaactgacctatggcagaattaggaatgtgaataggaatgaggcttggagttccccattcctgctgccctaactcccactggaatgtaatttgtacaaagagtgacgacatgtgaagatgtaaaaaagaggactagagatgtcctcctgagctgcacaaggaagaaagctttttatgaccatccaattctgcaaaggacctagtttcccagtgcttattaccataaggatgcagaaagaaaaaagttcacagacataagatttcatgtgaaaaccaagaaaaaaaggttactgtattttttaaaggaatagcatttgatttggtgtaatggcaggataaagaaatgagaaataacagtggggaaaaaagttgactacaaagatgtgaataagatcagatggcatagtaattttattcgtaattaaaaatctggttcagttaatggagagatttaatttcaggagcattaactagtagactactggatacaatgtacatgtttaaataaatcataaataagtttctcctaagagctactttaatgttgtagcattctaactaatgagtagtatgacaaaattacgttgttattataatagcaatgtatcagtttttctgttgatgaaatttcttagggttagaatttttttttaccagatatgaaatagacttacacttaaatactgttgaaagttgccatataatgtggctattatcttggagttaattaaagttaatttagttttgagcattattaagctctttaagaaaactggaagacatcaaattcttataaaggaaagcaggacctatttgttaaaacaaaaagaaatagctctgtattcaagagtagttttctcaatggatactttgcccgtaaacattaaaactcactaacacttaaaataaatagatttgaatggatggctcttaccacaagttaaaggttgttatttcattaagctaaatgtagtacgtataactgatttttttttttgagggaggaggcattaccttggagaaggaaatggcttcagataacatctatgaaaataataataataataataatgagattatacgcaagatttgaaacattttcagagttggatagaaatttacacaaaccagatttcccctgggagatcctaagataaactaacaataatgtcacacacatatcctgttattttatttactaaattctaaattaaatttctgctctggtgctatgaaggtcacccagcgtactcttttagataatacaggagattccaggattgaaccaaaaccaagctaagcagaatattttccttccgagagatttgaaatttgtgataaacacgtttgattttttgtgtgacattatttggtaaaagtaactttttcagaagctcccccaaatctctatacccttctttgtgccaccgtgttttcttgtgtattggaggtggataagcaaactgcaattgggatagattttcacctaaatttctcacattttcataagtgttctgttcctcttatttactgcttgcaatccacatgtgtatactgcacacacactcacacacatatacacacacataccctcatattctaaagaataaaaacacaggcactgtaattgcatatgtgtatacttagggggttaaagcctggcttcaccactcagtgctggtgtgaacttggagagcttacttagctcaggtccttttgttttcttctgttgtttgtttttgagacagggtctcactctgttgcccaggctagagtgcagtggctcagatttcagctcactgcagcctccaaattccgggcttaagtaatactcccacttctgcctgtagctggtaccacaggcacgtgccaccttgtccagctactttttttttttttttggtagaaacagggtcttgccatgttgcccaggctggtctcgaactcctgggctcaagggatccacccgcctcggcttctcaaagagctgggattacaggcatgagccactgcatccagcctagcccaggttctttacctgtacaatggggataagagtactgatatcacagggtggttgtgaaattaaaatgagatatgtagagatatgtaaagctcttactaaagtgccagcaatataggaaagaacaacaaatgacatttactctttttatgttgtctaaagtcatatgagtatatagtgaagttttcagcataggctctgtgtgagaatacagtagtccccccttctttacagttttgcttttggcagtttcagttatctgcaatcaactgcagtctgaaaatattagataaaaaatcccagaaataaacaatttctaagttttaacttgtgcactattctgagtagagtgaaatctcgcccatcctgttctgtccctctggggacatgaatcctctctttgtccaggggatctatgctgtctacactccccaccctttagtcacttagtaaccatcttgatgatcagattaactgtcacaatgtagcagtgcctgtgtttaagcaacccttcatgtaatcatagccccaaagtacaagagtagtgacatcaacatgttattattattattgttcttttttattattaagtattgttgctaatctcttactgtgactaatttataaactaaacttgatcataggtatgcacgtataggtaaaaaatagtatatatagggtttggtactatccatggtttctggcatccactggggatcttggaacatattccttgtggataacggggaccactgtagaggcaaatggatatagaatatcctttaggtttatttttttgtctgtctttccctaaagcaataaatataaagaaaatctaaatagttggttttgacaacacataggtgtattatattctgcctttttagtgctcagtattccaatatttcattttgtagatgtgaaaattaaggtaatcaagggtggaaatgcttattggagatcatggaactggctcgtgatgcaacagtcatggagtgctggtttaaccgagttgaatacaacacgaatgcccccatgaaaagcaatgaatacagaagtgctcaaaagagtttacctaagaaaataaataggaagaataaaactcaaagacagagaaggtatattaatattcattatcactgaagagaagtaaacttaattttttaatattataagttaatgacctcaagcaaagtcagatattgaaaggtgatcgtttcaaagattgaaactgagtgaaaatatttcaggaaaagagagttttagctattcttaaagaaagagaaaaaagcagattcaaggatagctttttgaagaagatacagcttgaaatggcttcttttactccctcagttaaaagtggtaatggatgtgcctaactaaaattcccacaggaaaaacttctttagttcacctctctcttcctgctttttttagttgatttcctatgtaaatatgagagctcttaataaaaatatgacagaaagttggaaagagttttcctgaaataaataccagatgagtatagtggttacttgaattatgtgcagtaaaagaagatgatactctacaagctcggcttttcggcgacaaatctgaagtccatctccattgtgagtatttacttgtgtggcttggacttcctccattccagagaaagaatcagtcctttgggaatccatgaagtgtgtcctactgtgccaggcctcagccactaacacaggtccctagagagccacgctgtcttgctccatgacctccaatgagaaccccttcttactgccctttcattgattaaaacgagacatttgctgggacctcattgtgggctaagcacattgcagtcagtttccacataatgttgctcattggatcattattttaatttttctctctttacctcccccacagctgtctttccttatctgcaatgttgcatgcacaatatttactttcagcaaatgatgtaaatcacccttgaatgaaaagactgaaggtgcctcacctttcttcttcctgtcctattactgtgttctcatggccttggattttctctggataaccacgtatcctagttcatgcttttgtgtcataaggaaaagttggcactcccttttgaaaagctaaacttcccttcctgctattcatcctgacatttctgccctttattaggaacttgattcaacaattttctcttctcttatatcttcaatttctccctttcttgtttctttcctttaggcttaaaaatgtctttaacatccttaggtctttcctattgttaaaaacaagcaaactcagaatccttttctcaaacttaatactttgttgagttggcacccaatttgcctttttttttttttttgagacagggtctggctttgtcacctaggctggactgcagtggtgccatcatagctcactgcagcctcaaactcctgggctcaggtgatcctcccacctagcctgagtagctaggactataggtgcccaccaccacatctggctaatttttgaatttttcatagatatggagtttcaatatgttgtccaggctggtcttgatctcctgtgctaaaacgatcctccaccctcagcctcccaaagaagtgctaggattacaggcatgagtccacgcccagcccttaatttgtctatttttattgttaagtttctcaaagaaatgctcaatgcctgggtcaaggacctctacagatcttgagtctccttaggacatccctttccaactactcatctatttgatgccagattttctacatgtacttcaaccaaaacaacatattgcaacagattgaatgcagaagcagatatgagaatctgctgccttctatgaagcaagacattaaagagatttgcaaaaatgtaaaccagtgctctcttcttttcaaaattatttttattagggaaaatatatttttcataaaaactaggttatttatattactatttaatggagttagcgttgctatttttaaaagagtttatttaaaaagtcttaacttctttagtggtaatttctagtacggtaaacactggtagatttaacccacagaatcagaagctctttgggggtcctcagtaattttaatagtgaaaaggagttttaaaataaaagtagttgacactttatgaggctgaggcaggtggattgcttgaggtcaggagttcaagaccagcctgaccaacatggtgaaaccccgcctctactaaaaacacaaaaattagttgggcatggtggcacgtgcctgtaatcccagctacttgagaggctgaggcaggagaatcacttgaacctaggaggcagaagtgagcgagatcatgccactgcactccagcctgggagacagagtgaggctctgtctctgaataactaactaactaactaactaaataaataaataaaaataggagttgcaaacagtaggtctatatccgtgattgcttttcctcaccactgttgcctcctttttttaaatctctgaccaaagaactggctccacttggtgtcctgtatcagatttcttgggccggccatggtggctcattcctgtaattccagcactttgagaggctgaggcaggaggattgtttgagctcaggagttcaagaccagcccgggcaacatggcgaaactctgtttctataaaaaacacaaaaattagctcagtgtggtggcatgtgcctgtagtcccagatacttgagaggctgaggtgggaggattgcttgagcctagagggtggaggttgcagtatgccagaccttctagatacaagcaagcctcttaccttagcttcctgagtggctgtgatttccctagtcttttatcctccctagttgctaagcaatgtttaacagtgcctacctctcatttcttcttgatattctttccttctacggcaacaaattcccctgatttcttcccaaccttcctgactacccatctttttctctcttggttcctttttcctgggactgtattttcctcttagctgactcagtatgcttttccttaaagattttttttttctattgcccttccaaaattttttctagatccaaagcctttctcacagtgtcaagaaaaaaacattccagttgccagatgaacagcctgtttcagtatcatgggtctaaaaccagacaccggtttttcctccagcaattcttctggttaacttgatgcctctgtctatcatggaaaccgaatttcctaagtcatgcggatttaaaatgctagaaaatttcttactcctgtcaccactacatctaatgaatcagatgttctgtttgttcttgtgtcatcccagtccactccctgacaaagcatatctgcaagcttatcatcataaacctaggctatttcaatgctcacgtattaaccgctcatcacatgaatagaatttcatttgcctgatttaccctacacagcccttcaaatttatcaacgaaatcactggttttcaacttttatttttaagtaggaaaagcttttccgttaagtttttgcaaacaaatataatgcaatccaatatttgccctccagagctatgccgatttaccgctgaaaccttgagcaaagaaatactcaaagcttcttctaggttgtgtatgtatcacaacagaggaaggaaattatgagatgggcacttgggagactgttttcttggttgccctctccttgtgaaaggtagggctacaagcccccatttgagccaaagctaaggagtccggtgcccatgaaaaagacgcaagcaatgctgtcctccttgatggaggctgcagaggccagaaccacacctgctcagcctggccctgaggctgcccctgtggcactgctgaaagtcagtcttttgtcacaaggaaggcagtttttctagacaagattattctcatcttaagcatgaggtaggggtgtgtgtgtgtgtgtgtgtgtgtgtgtgtgtgtgtgtagtgtctaagtctacttgcctgctttctgggaactggtaagagataggaagatagaagtcatcatcattccaaatgtaggctttcacttaatttttctattttcagtctgagaccacacatttacacgtctctcagcctgcatccccaagctcaaaatatttctgctttaatctcttcagagactaaacctcctgtcccccactacatggagaaggcttggttacctgttattcaaggtgttgcctggatctgtgtatatactttaattcattccctctgttttcagcaccaacacccgccccctttcctcctagcttccttggtacttggtgcctccaatttttgaggctttctataattacttagcacaaatcaactttcttgttgattttcttctttataggagcatagatttcagcatttgtgactttgacaagtcagttgttacaaattcatcagctgcccatctgataaaattttaatgtcttttctactctatctcttctagcttttcttttcttgtgtgtcgatacccattttatttctttacttaccctcattttagtggcatttcaaaaggcgtactagttacctattgctatataacaaattaccataaacttagttgcttaaaacaatgcacatttattctcttagagtttctgtgggccaaggtactgggtgtagctcagcttggccccctactttagagtctctcacaaggctgcagtgaggtgctggccaagactgggatctcatgggaaggctcaaaaggaaaagcatctgcttgtatgctcctggagttacaggcaggttttagttcctgatgagctgatgaactgacagtcttgttctttagtgactctgggccagaggtcaccctcatcccttgccacatggctctctctctatagcagtttgtttaatcaaagctagcaatggtgagaatctgccaacaaaatagaagtcactattttgtgtgacataatcacagaaatgacatctcatcatgtttgccacattctattggctaaaagcaagtcaccaggcccgcccatactcaaagtgaggagattatacaaggcgtaaataccaagaggcagattagaggctattttagtctgttgatataggaggccaaggtgataaacacatgggtccaagtctctctctaaaactggagtcccctctctctcacttccatcaagcttacagtccacttctcctgtcaaggtcaagtagtgacctccatcttgcacaatccagtgaactatcccaagtgatcatcatactcaaacaaacaaccagtagcaactgacatattctcttcctgaggcattttatttctttggatttggggatccctcacctccttgtcttttcccttcatctcttgtctctgactcacaggctcctttgttcattctcatttttcttccttttggagggctaaatgctagaggtctacagggctccatttgtagcccttcactcttctgtaattgtacctaagaaatctagtctcatgacttcatagtccatgtatatattgatgactcttacatttatatctccagctccaacctttcccctatgccccagatagtacccaattggcatctgtacttggactcaaagacattgcaaacttaatttctcaaagaattaaaaatagaactaccattcgatccagcaatcccactacttggcatctactcaaaggaaaagaaatcattatatcaaaaagatacccccacttatatgtttattgcagcactactcacaaagggcaaaaacatggaatcaacctaagtgtccatcaatggattggataaagaaaacgtaatatatatacatacacatacaacacacacagacacacaccgtggaatactactaagccataaaaaataaaatcatgtcttttgcagcaacatggatggaactggaggccattatcttaagtgagataacccagaaacagaaagtcaaatattacatgttctctacttataagtgggagctaaatatgtgtaccatggatatagaaattggaataatagacattggagactcataaagttgggagggtgggaagggttcaagggatgagaaattacttaatgggtcaatatacactaaaagctcagatttcatcgctattcagtatatcagtataacaacaaaactgcacttgtaccttctaaatctatacaaataaaagctaaaaaatgaaaacaaattagacatctcaaatgacaacttaatgcagaactcttgatttcctcatccttccctgacctttacctaaaaacacactctgcccaaactgatgcccatttcaataaatgtcactaccttccacccagttgcttaggtggaaatccaggcattttctttgttcctcttctttttttcacaccccacatacacttctcactcagcatatcctgacagcgccaccttcagaatatgtccattatccaaccgcttctccccagttctcctgcaatcacccaggcgtggtcatggttgtctcttgcctccccttgactggtacatgtgccgttcccctttgcatcaagcttacatctgctccaggatgtttatatttgcagttctctccacctgtaattcttatccttctgatttgcatgtaactcactcctttttatcatccaggtctctccttaaataccacctctttggaaagccttccttgatcactctgtgtaaaatagccaagcctccgttattcactatcttcttttgctcttttatttttcatatatgactacgtgaaagtactgtctgttgttatatgtctagttacttgttatgtgagtataagcttaatcaaggtgatgctttattgcacttagcgctgtttccctgcaatccagtacaaagcccagtatgcaagttataggcatgtggtaagtgttggatatgtgcaccagttgttggacaggattgaacttgcgaggtcagctttctcaggtgacctcaaaggcaagcatctagtttattgagtagtacaacaataggtatgttgcatgtacatatatgtataacagaagtttatttttaagcctgaattagtgatagcaactctgttcatgagtgattatgtggttctttttcatctttactctttctcagagaaattcttctcttcttcccacattgtttgactgcttagagtagataatagaggagtggtaagatgtctgagtatataatgtaagggggtttggttcttgtcatatatagaatacatataggtcctattataaacaacatatggttcttctcatatatagaatacatacaggtcctattaaaaacaacatattgtagctttaattcaacacacgactggttcttgtataaagtttcactgagatctttattgtggagaattgcatgactattccagtcctggactcaatttgaataaaaacataggaaccaaattcctccactaaataactgattgatacttaaatttgacaacgatagctttatagaatagtccagaacatatacagtcgtacctcacttaacaatgtggctacgttctgagaaatgtgtcattaggcaattcccgtcattgtgtgaacatcatagggtatatttacacaaacctagatggtatagttcactacacacctaggctatgtggtacagcctattgctccttgactgcaaatccatacagcctgctactatactgaacactgtaggcaattgtaacacaaaggtatttatgcatctaaacatatctaaacatagaaaaggtacagaaaaatgcagtatagaaaataaaatatggtacacctatgtagagcacttctcacgaatggagcttgcaggactggaagttgctctgggtgtcagtgagtgagtggtaagtgaccgtgaaggcccaggacattactgtatacggctatagactttataaacattcttcacataggctgcactaaatatgtattaacaatttttctttcttccaaaattaacctaattactatatcttttcactttataaacttgtattttttaaaccttttgacttttgttatacttactttaaaacacagacacattgtacagctgtgcaaaaatattctttcttcatattcttattctataagctttttctgttttaaagttattattaattattattattttactttttaaacatttttgttaaaagcacacattaaacacacacacacattatcctaggcctacacaggatcaggataatcaatatcactgtcctccacctccacatcatgtcccattggaaaaagtccagggacagtaacacacacggagctgtcactttctgtgataacaatactttcttctggatacctcctgaaggaactgcctgaggctgttttacagttaactttttttcagataagtagaaggagtgcacttaaaagaacaataaaaaggatagtaaatacatagaccagtaacatagtcatttagtgtcattatcaagtattatgtactgtgcataattgcacggactagccctttataccactggcaggacagtaggtttgtttacaccagcaacaccacaaacacgagtaatgtgttgtgctacaatgtcactaggtgataggaattttttagctccattataatccttttttttttcttttttttgaggcggagtctcactctgtcgcccaggctggagtgcagtggtgctatctcggctcactgcaaggtccgcctcccgggttcatgccattctcctgcctcagcctcccgagtagctgggactacaggtgcccgccaccacgcccggctaattttttgtattatttgtagagacggggtttcaccgtgttagccaggatggtctcgatctcctgaccttgtgatccgcccgcctcggcctcccaaagtgctgggattacaggcgtgagccaccgcgcccagccagctccattataatcttatgggaccactgtcatatatgtggtccacggtttagagtatggaaatgactctatttccatacagtacttccaataataaattaagttgtttgatttctagattgaaaatggctttgataatcttgtaattggatttatatgcctttgagtctctcaagtagaactgatttacctttccattcctttctctttcctctctggtcacatccctattccacatttgttttttttgtaaccagatacacaaataatactttgtattaagtggttatagtgaaagctgggcattctgttctagtgaataatgattcttatattccaaggacaaactacctattaataataattgggtattcggggcttaaaagttgtatttgaaagatgcagccaggtgtggtggctcacgcctgtaatcctagcactttgtaaggctgaggcaggcagataatctgaggtcaggagttcaagaccagcctgaccaacatggtgacacctcatctctattaaaaaagaaaatacaaaaattagccagacatggtgggaagcacctgtaattccagctacttgggaggctaaggcaggagaattgcttgaacctgggaggcagaggttgcagtgagcagagactataccactgcactccaggcatgggtggcagaatgagactccatcagaaagaaagaaaggaaagaaagaaagagagacagagagagaaggagagaaggagagaaaagagagaaaagaaagaaagagatgttatccatgatttagtggaaatgagaaaacctagaaaataccatgcaattctaatgaaaattctagaaaactagaaaaaaggaaagagaaggaaattgagaagaccctgtaatctgttgaaatgctgagttttcctaattaaggaaagtaaaattctagtcacttaaaatgcctccaagaaagtcactgtttttgtccatttatatctttctgctttctttttcattttttccctaaaaattaattaaatattaattacttttagaggaaagattactctgataaaatggtcaagaaaagcaaagtttcttactttctgtgccaaagattttcagccaaagtaataaaagaaaaatcttaaaaagggaaactatgcaattcgaatggaagatccattttaaaaagttattgtggcagtataaaatgatactgtgtgctcaaatacctaaaaacttttgcaacttacgaaatggtatttttagtattacttagggtgttgtatgggtgtcttatgtaacttgttaaggtaaagaattttgctattctcaacttcagtttatgcatctataaaatgagaaagcgcaaaataatacttctacctcatagggttatcgtgaaagttaaatgacagagggataaatgaaatatttagtatagtgcctaccacaaaagccaaagctaaataagtgatagccaagaacaaacacagaaaacttcctaaataaaaatatgactagaataactgcaatgtatggaccaacataagcatgtttaagagtgaacacaggtgctattagtaattacacctggaccaaaagtataacccaggatgctccctgacatactagaatttatggtttctctatctataatctattaacatagcaggcagtaaaccttctcttttgtggagaccacacatgcaccagacaagcagagcctggattcaatagtgtgccagtaactcacccagattttcaagaagtaatatttactgggattatggattaatcagagcttgtgtttaccaaagtaaagttcaccaatgattcttcaaatatgttcacaagctaacttggcttatatccatttacttataaatcagaagattccccaagattttactgtctgcctgattaaagctagtatgtgctataagtgttttcaaaatacttttttccaaaactgtccttgcagttaaggtgctgttaattcaaagtacctatgacttcctatcagaaatgaaaatgacacttaatgagaacaaaacatgttttcacttgaaatgcaattaaaccaaattagagaaacagtgtttttctaactaagataaaaacagctgtgtttatgaagctgctctaatggtattagaatttctcttatggaaacttttgctttatttaagatatatgatttttattttaattgacattttagacaatgatactttcattacaattttttcagtcaagtatttctttagggaatctttcctataattcatagtgagctaatttgatcatgtattaatagagatttcatggagatttgtttttaaaggtttttatgtgaaacctttaaaaggcctcccaacaaaaactttacttcatgactagatatgatttaatcatgattatgtcaaaattgtaatttttaaaatgccttaagaaaaataatttctgcatacatttgtgtaatttttctaaaatgcaaaatttgtaacaatttctaaggtgtagaaaaaacatttacttaagttgctggtttttttaatattcatgtgtatgttttgggattttgtagatataacctatgccttagattactacatgttgatgtgacttgctgatgtttcaccaaaaaaaaaagaatgcttccatttctacacttaacatttttttctttatctttcataattacggtccataacacttggagtaacaacatgttttcctgtgtatatataatataaatggttatatacaaacaatagaagaaatacgcaatttcccaaaatgataacatttgaagacgtcattaccaacaacaacatcactagaaacattactgctgttaagagcttgatctagaaaatataagcttaaactgctctgtttggaaacagcatgtaatcgggatatttaactagaaattcaagtacaataaaatggatttaattagttatgtagctataaaataccttaaatttttttaggctatgtctgcatgggcaactacttaaatgtttttagattaatttattttagtcaatttaattttaataattacctcaactatatgttattttcttcctttaaataatcacagaacacgctgttttaggatcaggtagaagctgagacaatctcttttgaacaaattttatttttattccaaaattaattgtcctaaaaatagtacatttagccatgaaaaagagaaaacaagtaaacctatcaaaatgggacactgttaattaactaaacatagaaaatagattcattcattatccaccaaaaatttcaatgtacctgccaggtaaaagcaccatattcagtaccatgaaagtgataacgattccaataacagaacatcttccctcaaagaacttatcacatgtttatgtataagtttaaatgcattgaatgtcaaaaatgcagatagcgctttgatcaaggacattttagcaatgtattcagacaggatctttattttctagggttttcattataaggcagaaaggttagactaaagagtaatgttaaaaatacaaattatttttgtattctagacatttctataagaaatgtatggaaatagaactgtaattttggcagtttttgtcacagtgtcagtgagcaaatagatgtcatactcatgagtacagaaagaggacattctctttaacagccacatacttcttacccagaaacccttggagaagatttataaacccacatactcagaatatggtaatgaggaaatgctgtctgccctgggaaggggaagaggatctaaaacatttaggacaggtaattccacaaccatgccttaagataaatccatgccttgaaaagtaaaaagaacagcaaaaacagctagttagtcaaaggtcaagatagcaaaccctagctggtaaacttgtctgaatctttactgtattcctcaagctataaactatgtttatagactccttcaaacaggattaaattttggaggcattttcttaaaaaaatagtaaatccccactgtaaaattagttataggctttggacaggattcttgccaatggggctcagaggcttaagttttattaatttcacagtaactccaccttagttcacagatattttcaaaacatggaaagtgtgattgaagtcaggtaagtctaatcaaatatgagttctggtgccacagaacggtgatgttgaaatacttggcttttattggctatttatggcttttattggcatattaatgtcttttactgatgatctcaagttctgtctatagaaacactgatgtctgattgtaacagtttaatcaatgtataaaccaatctggatggttcagatctcaattccaacgtttcctttagaattcaggctcaatttatctaaattgggctcattatattattattaattttactttggctgtgggctgagttaaagcacactatgtttttgagcattctaagattgttccaggatttaaaaatttaagattactttggtttcttggaattatttaatacacactgcaattttccctgaaaaacacatgtaagctaaaatggctctatggaaatgttttatgttttaatgaggttgggaaacagagataaattcacctggtcataatcatatggtaaatattgatgaaaggaacctttttytaaactgcatagctataattctattccagctgattttgtagatttaaaatattttaccctgtttttgtgtctcttaaggagtttctgtttgggttatttgtacagatcaacagataaaaacttatgtcctagaacaaaaacagcacacttaaacacatcttttctttcaggccaaaaagtttgctgtttcaggaccatggacctccttaggaacatgtacatatttccctaatgaatccttaggctgtgatatgttttcgagttaaattgttattactgatagaaaagttctttatgtctgccataaatgtgcattaaagtttatatagcattcaccttcatgattggtgttttatcttactgattattttggcagagaacaaataccaaaagtctccccatgagaaataaaaacaaaccacgaccctctaaaaatagaaaaaaagccacaactcttcaggtcctccttggacccatggacaaggctcataaacctccttggtgtccattccatgttctgtgaatctggctgatggtcaaagaaagggctagagacaggatgatctacaaatagaggagattgaatttccaaatgaggtttgatcatctgctctttgtgaattttttccaattgcttccccatgtgccttggtttagcctttcaaaaaattagaattttatacccctaggatgtaaaataccatgtcagcgcactttttgtgcctggaatgcaccttggagatagccttgcccattgaccagctcttcatttttcagagggagaagaaagtgaggtctgggaaagtaaaatgcctgcccaaatccacagagctaagaagtagcagagcagagatcattaccacacattccaaactttcttcctatttatcatttttctccttgagccccttcttgtctgagacactacatcaattaaaattattttataactgcaacatcgtacaattgccatgtaacacattgcccaatgcaattcaatcttagcatctggaaacaatactcatttattaactcacactttgtaggtcagaagtctgagcacagcatagcaaagtcctgttcttagggtctcaccaggctgaaatcaaggtgttgaccgggccgtctcctaatctggagtgtggagtcctcttccaagtccattcaggttgttggcaggattaattcgttgtagctgtaggactgaagtctcttttcttgctagctgtcagccaggggcagctccaagctctcagacgctgccctcaggtcttagatgtgtggccctctcactatacgacagctacttcttcaaagccaataggagaatatttctcttcaggaaaggttcactccctttttaaggactctgctgatgaggtcagacccactcaagacaatctccctcttgattagctcaaagccaaccgactaacaactagtcaagagtggtatcccatcatagtcgtaattctcacttgtgctcaaaggggaggggatcatacagcatgtgtgtaccaggggacaggagtcttgggagtcatcttagaattctgtttgttgggccgagcgcggtggctcatgcctgtaatcccagcactttgggaggccgaggcaggtggatcacgagatcagaagatcgagaccatcctggctaacacggtgaaaccccttctctactaaaaaaatacaaaaaattagccgggtgtggtggtgggtgcctgtagtcccagctactcgggaggctgaggcagaagaatggtgtgtgcccttcgaccgaacttcgcgctcagcttacgtgccacactgccctccagcctgggcgatggagcaagactccgattcaaaaaaaaaaaaaaaaaaaaaaaaaatataccgtttgtcggccaagtgcaggttctcacgcctgtaatcccagcattttgggagaccagcctggccaacatggtgaaatcccatctctactaaaaatacaaaaattggccggatgtaatggcgcatgccaactactcgggaggctgaggcaggaaaattgcttgaacctgggaggtggaggttgcagtgatcccagatcgcgccactgcattccatcctcagtggcacagtgagactccatctcaaaaaaaaaaaaaaaaaaaaaaaaagaattctgtttgtcacgttggtctgattctactcattcaagtactagatttccttttgcctcctcttaccttctgctgccccccaactgagttggttcattgtcttccatcctacagaaatccagaaagggatgataagagaaggtaaattcagactagggtgacgaaaactccaaatccatgaacatatggcatttttattgggttcatgtattctttgcagctgtaagggcattggccagggataattcagaattaccttttcactaattactgaatagtaaaatttacctattctttgggcatgaagcttcttttaatacggctggcctggattcagagatgtctggggacacctgtgctgggttggcaggagcagcagcagctggaagtcaggggagagtggcaactaaagacctgccattttcttagtgcctatgcaggctgagactttactttcatgagctcatttaatcttcacaatggtgactgatacagtcaatattataatcctcattttacagatgaggaaatagcagagatgcagcagagtcagagttcaaagctcggtcagatacaccagtgctttttcaaggacaggcttctccttctcaggttttggttactcttgttttcttttttcttttttgagacagagtctcgctctgttgcccaggctggagtgcaggggcgagatctcagttcactgcaacctccgcctcctgggttcaagtgattctcctccctcagcctccggagtagctgggataacaagcacgcgccaccatgaccacctaatttttgtatttttagtagagacagggtttcatcatgttggtcaggctgggctggaactcctgacctcaagtgatccacctgcctcggcctcctaaaatgctgggattacaggtgtgagccactgcgctcagctgagacagtgaccctctgagggtctcagcatatttaggcagagattgggggatggcggagggagctactgagtgacaggcaccctctgagagggagcctatctcaagcaatcaaaaaatatcaactatatgtagggactctttctcccttcaagagttacaattaaacttttcagaaatcaagatcaaggctatagatgataaaaattttattcctaaaggaatttatagacaagaaattgattgaaccttataataccccatgatggttcatgagaaacacgtgttcatatgattataccatgtttttaaatatggggaaataaagcacagagtaggtgaatgtgaatttagggacatcaaaatgtaatgacaaaaatcagctaggcttgttcttgaatccctcaaactgtaacttttggctgaacaaatgaattaagatatagctaatacagctgcagagcttggaaaagttacagttgctttgttaaagtatattgagttggagtaaaaagttctatttggaaagatttcaaaacccttcaatggcagcccaatcattccgaagctgaattaaatgtaaattgtgaattatctgcatacgtttatagtctattcattttaatatacatacggtggttgtgtactttaagaagataaaaagatgattcctgaggcatcattactgcatggcagagagacaaacttgaaaacaagtaattataataatgcaagtgttaaactgaagatacagagaaggaatacacatattccacagtcactggttccctttgggaacatcaggaaaaaacagaagaggaaagttttgagttgggtctggaagaatggaactttagcaggcagaaaaggagaagaaaattccaagtggtaagaaaaacacagttaaaatcatagaggcaagaaaatataagaggctagaaaaccatagttcagtgtggccagggtgcccacaatgcacaggagaagatagaaaagagattgtttatgcagcaatgagattggaaaggacctggctgccctctaaggagaagtttctattttatagcagcaggaatctaatagagacgttacacgaaggaatgacaagataatcgctctattttagaagattaactctggtagcaggagctgggatggctgggggtgtgaactgaaactgacgctgcataagaagagaatttacaagcccagtcaaagaatgaggaagaggacccaggtcagggaagaagcaagacaggcgatgagaataaaggctgcttcagaggtgaacactgtagaattgggggcaccaggtggctggaggcaggtgagaagaaaaggaagatgtaaagagaaaaatgaaggatgatgcctagtttctgatcctgagctctgtctggctttttttgcggggaagagatggagattaatgaattgtctttgggcatgtttagtttcaggtacttggaaatacaggcttgcagtttagaaaacaacttacagctgtagataaacatttacgaattatcaacatttgaggtagtggcaagtaaatgatgtttttatagaattatcatgtagttaagaagaaaacagttttaaatattggaccatgggccagcatttaagagaaagttaaggaaaaaaaaaagatttaagaaaaagacacacagaaagtcatgccactgagattttactatgagtcccaggcaaaggttttaagatgagtgtatcaatgtcccctaggcataaaaaggattaaaaagagaagagttcagatgacaatttggaaggcactggtaaactttgagcagtttaattagattggtggagagttggagacgagacagagtccttgaactgataaacaaaaaaaatctgagagtatttggtagtgaaagtaaaggaagggtcaaaagaaaggttttgttgttgttgttgttgttgttatggtttcttcgatagaaaggggaaagataatggttaattggggtaacccagcagtagagattggcagggcaggtaaaccggcaggataaaggaaggagagtatggattagattttaataaaagtttcttagggaagaggggaagaaggaaaaaaaatgagttgagaaaatatatattaaattctttacattgtgcttctgagacagagctatatttagcacccataataaatatatctgataagaatcctagtatgttgctgactctcagcactctgcttattattatgaaaataaaaatgacttccatgtcattctgtcagactatcttttggaaaaaacaacgacaacaaaaataaaaatgtcattcaatccgaaagcaagagaaaagacaccttagtaaaagtaactttcttcttccacctacaaaaccagaacttgaagacacaaatctcaggtgtactgaaataatttttttgtgcctggatataactgctttatgggatcacagagacttcagtacacactctgggacaaacagattattcacaaatgatgatccaaacatattctaggcattcaattgaataaggcccaggatcacccccagaatttttctctgggcgccaaagaatcctacatgctgaataagaccctaggcaagaccagagctccctgcaccatttgaattaggtagtttccatcttgcacctatgggaaagagttggagccaacccaatctttatgattaggcaggaaaaacaacattttccataagaatgtaatcttctgcatggttggtcaccagttatttgttggacatccatttggtttctgccaagttagctaattgttctgctaaatcatctttaaaagatgacttgccttcttgagttgttaatacttgtgaaattcttttcccaaatgaatgagaattgaaagacatagattcttttaacacacacatacacaaaattcccaaacatatagtgtgttgaaagttagtctgttgcaaagaaacttgagttctaggcccggatccaggggtggagatgactgtaacattccaccaagaacttcactcttggctttcacctcgaaactaaaaatccctagttaagtcagatatatgaagtattgcactctaacatgaggaggaactgaagaaaagggaggatgttttcataaagatttagtgaggaagttagaaggaattatgtgtgaaagaaggaaaaagagtaattgtggtattattacaatacatgcctgggccaggtacagaatatgatgggtccgtgtttcactccatacagccctgttatcatgatgacattatgaagtaatttcctatatactataatctgttttggaaatgctttctaccaggtgtctcttatggaacatacaggaaaaaaaaaaaaagagttgacctattaaattactctcgctgttcaaatatttgaagtactaattcatcactcatgacattcaatttatattttaacatcattataaatttaacagggttgaatctttcaaaataacaaagaaagtgccttttgaaaggaaagaagataggaacgttgaagaggttcttgtgggatcactcttaaaagccatcaaagcatctgaatctctctcttggctgtataataaatattcacagaaaatgaccgccaagtatgtatggagaaatgccttggcatttgctgtatgaatatggatgatgggaatatagtaaaatattagagagattaaatcgaaactcaaagatagttctaaggtgtttactgggtgtcacttgatgaaatgactctatggggatttatcactaatctgtgaagtgaaaaataatcttaatgacgagaggaagcttacctacattatgcctaggacaagaagtttttaattcccctctaacaatgcagtgtttgcaggttttcatccattatcactttgttagagtatctttgctaaaacccaactattttataggctcctctgacacctcacaagaatccaagggaggaaatgaagccaatgaatgtaatctacaggtgaaatttgcagagcaaattcaggaaaaaaaagtaattatgcttcttcgcattttatcattttataacctcaccttttagagaaggtattgagagattatactgattagtccagatttttattttacatatttgttcatggaaaggcttattttaacagaagttatatcaaggtgtcatgcccagtaccatcatcatcatcatcaaaaatttgactgaataaacctaagtacacacacacttctgtatgtatagtcttacatatgaaagtaatatttattcattcaccaaaaagtgtaaagagaggttaaaacaggatgggatgaaacagtgtacaaaggtaaggaaaagcttttccaagcaactgaatttcccttgaagcctgaatgttaagtggaattaggcaaagtgtggtggttgtgggaaaattcaggcagaggatatagctagtgcaaaggctctaaggctgcaaaggatgcaagctatgcaggcatggtgcaaggaggcctttgtgcaggaagcaaagggagataaggctggggtgacccacagcctccttcttcaagggcactggatagactcctgggaagcaaaaagtgactggattaaatttgcatttcaaaaagactcttctgactacagtatgtggcaagataattgggtgaagcaatagtccaggtggaaagctttattacagtcaaaacaaaaaaggatgaagacttggattggggtggtacttagtgaagaggcataaaagaagactgaagtcaaaatgacaggacttggggatgggtgggccacagaaagaaggtgtcaaaatgattgtcacagtaggtaattagtcattgattgatagaaaatggtaatcactgaactaggctttttatcttcattctgttctatttaggttcattctatccaaagtatttagtgcttaccagatgcaaagtacagttaggaattctaatggatagaaatataaaataaatggatacaaggttatataatctctgccttttataggcttatattcaaatacagacaatgctttccatttccagtaaagggaatgagaaattatatacccagatacatatatattgacacacaaataaacagatgtatacacatgtatgtctacatatgtatatatgtatgtacacatatgcatatataagtatatatatatttgcatcatatacacatctaaattaagggtgcattgccaggggactgaggaggataaataatgcagaggtcagaaaaaataactgaaaagttgtgtgggatggtattcttcttataagaaattcaaatgttttcaaaaatgattgtcttatatatctgccttattacagaagaaatgtatgacgttggccctgtttatcagggccagaagaagaaattcagcaatagtatttagcagtattaacaattttaatccatgatatcagtcatgacactacaatcctgacagtaatcttattaatagtaatgataaataatagtaatcattagtatgtagtaatttttaaaagtcacacaagcagaaaaacataaacatagatttgattttaatgttgtttgaacattgccttttagcatttttctttgaattctaagctcataattttatcataaaactgtctttacagcagacaatgactaattagtaattctattaaatatttgccaaatggagggtaccacttctagttttgccagagtgtcttgctggtcagaagtgctttgcctaataaactcaacatgcatgttgatgctaagagtctaactgaacacacaggacaatcgcaaatctgtgaattattaagcctcctttcacctcaatttcctccctcataggatggtctttgcttatctcagttttgtgtgtattccttttgattgcttgttaatgtctcctatttatagtgatattatgtaacagtattatttaatctccaaaatagtatacaattgtcaagtaccattgctgtaattatggtgcagatgttggaatatgcttggaatcactaaaagtgaatttaccataagctaaggaagcttactcttcagggactctgacttgcaagagcctatttaatttcttattacctaaatttgtaagtttaattttgcagtatttttcttttaaaagatcccccaaattttatgagcttcatttccagaaaactcatctggccttgtttttcatattgtattgtcatatttaatttgtttttatgcctttctcacaatattttaggttcatgagatcagagacagtattttatttgtttctctactgcctagcttattatttatttatttatttatttatttatttatttatttatttattgttatgagacagggtctcactgtcacccaggctggagtgcagtggcacatttatggcttactgcagcctcaacctcccagggctcaggtgatcctcccacctcaacctcccagtagctgggactacaggggagcaccactacacctggctaatttttgtatctttttttttttttttttttttttttgtagagacaggatttcctcatgttgcccaggctggtcttgaactcctgggctcaagcaatccactcatctcagcctctgaaagtgtaagaattacaggcatgagccaccatgcccggcctgtctatcacttagttcagtaaatgcttggtgaatgaatgaatcatatacatttagtggttgttttgaagttgactctgctgagtgagattttctttgcattcatgcatcttcattaatgtcaactttgttgcagtttttaaaaaagtaatctttgtttacattatcttaagttacttgatttaaaaaagttaaaagtgactatttgcagaattctaaagtcccattactgtcaacatgcataatattttgccaaaaatgcaatttgtcttgttagtcttctttaatttttccatgttttaaaacttttcttggagtatttcccaaatgggatttactgagaggatatattcagccagctttgtagattctaagagtccttctaaaagttaagtctagccaaggaaaaatgtagtggcacacgattgcgtttctcttacgctgtcatttaatgtgagatctaaattttgcatttctttaatgcccaaggtgtttattttttaaaatctgtactctttttatcaggagttatgttgacaatttacctgggagctgatataccctatataatacatgatctaagacctgaacaatacacaaattaataaaattaaaccattaagatatgtcatcatttctaaattatacaattgggttttttttttaaagcaaaaatattcttcctcttttctccatcccttgttctggtcagttccaaggttttttacaaatgcaaaagaaattcatttgctactcctgaccacagagatgaataatttaaggacaatatcaaattcttgataaatctcataaatgttttaactgtccaagaaatggacatttatttggttaatcttttagctggccataaataatgtaataaaaccccttaaaattaacattaaataacataaagacctaacgatttttagaaaaaaacctttttggactgagccttgaatttcctgagaattcagctacaagtgataactaaaatgtaactcgagaatctggatatggttccagaaaggattgttgtcatgcaattgccatttcatcatctttccttaaagtcccttcaatatttatcattgcaatttttgtcctgtcttttcccctccatcacatcaaaccaaggaaaaacaattattaaatgctcatttatactcacctccctcccttcatattcattcattcctcagccctaaaattcctgtaggaatcctgcttttacgttttatcttaaagccaccatagtatctgtaatctcttttgtagtcatgtatgcttaattttggaagactgtcaactacctcttcaggttcattcaaatgaaaatgtatcacaaaatcgtaggctcttcccctatctcactgaaaaattactctaaaaatgaccagtaagctgttttgttgaagcaaaacatccagaccctaaacaaaagtagcagaattacaacatttccatagaaatggattttgagcttcttttttttaattggggaaaatcttattttttaaaaaagaatcccagaatacatctttgctttcagtccttcaattctaacataatgccatgttagagaatatgtggtagtgtatactaagcccttatgctgtctcacatccttgggacaaaatatctgttttgaaaggacttctctgaattttgctatttcctgcttactgagcagtggccccctcctgggaaaacagagttatttcagccagtgttcagactccatcttgcatacgtctctgtggaatattaatagtgctactgagatatattcatcatcttttctctgcttttgctgtctttatagcccagtgaaatttatatttggtgtttgtaggaaggctatcagaagctacttggacatcaaacttttaaactataaataatgatggcaagactgctaggatatctttccacagttaaacccattcaacagagtttcgttcttatgacagtgcaaattaaactagaataaaattagtgtgattttaggacagttttaaagtgaacatatttccctccctcccttcccatctacatatcaaggagacactccagactgcacttttatttaaattgcggccatcagaaaataccgtgagaaggtagtgtgtaggtaatggttcagttagcattgaccccagaaaatggaaaaccaagagcaagtcacttttaaagtgaagcaatagattttgaatatggattgttccaactcaccacttcccgaccacaacacaagagtatttcactgtaaattaagagtctaagttaaccacagctgtggtataactctgagaatgttttctctacatgtagacaattctggatccttccgtggtgcccgttaccctggtctttaacttttgtcctttgcaggggaggggtcaatgccttcttatttccttgctctttagaattctccaccagagggaggacaagggaaggagtaggtttcacgcgcagttctgagtaaagtttgaatctgagaaaccccacattcacgaattaaggatctccagttctgtgtctttattctacccctccctgcctgcttttccactcggcagaactgagtgactttcagcggctgcagtaattttaattattctgagtcgtgctccgaactatgttttttatcagttcctctgaaaattaagttgtagtaagagacgtagtttaagggcacccccttagaagaggccaggttattttttaaggaaaagctgaagatttctaacaggcacttactaaacacacacacacacacacacacacacacacacacacgcacacggcgcagacccagcaggagagcgcaacctagcatctttaaggttcgcttagcccttcctgtgcacctggaaggaagccttatcttaaactcccttccacctagagtttattttcgcctgcgtgcgacagggcttttgtacttaagtgagttaaggaatgaaccccgaactcttctgggaaagccaccaacgttccccccgcacccctcccagggttcctgaccacggagactctgcttggggcacaggtgtgggagtcgcaaacttttctctgcgccgtccttttccgcgtggaatgggacggagcagccctcccaggcgctgcctggctgcggaggggagcgggcagcgagagcctcgggtctccgcctgggttcccgggtctccggggcgctggcctcggtctccgcgcagcgtccagcgacccctgtcgggggttcccggcagccgcgccgccaccccccgcccggccagcgcgggaggaaaaggggctgcgcccgggagcgccgagcccaggctcctcccggtggcgtgtccgcgcctcggggtgggggtgtggtggggaagagggagggggcgaggccaggggagggtgcgaaggaggcgcctgcctccaacctgcgggcgggaggtgggtggctgcggggcaattgaaaaagagccggcgaggagttccccgaaacttgttggaactccgggctcgcgcggaggccaggagctgagcggcggcggctgccggacgatgggagcgtgagcaggacggtgataacctctccccgatcgggttgcgagggcgccgggcagaggccaggacgcgagccgccagcggtgggacccatcgacgacttcccggggcgacaggagcagccccgagagccagggcgagcgcccgttccaggtggccggaccgcccgccgcgtccgcgccgcgctccctgcaggcaacgggagacgcccccgcgcagcgcgagcgcctcagcgcggccgctcgctctccccctcgagggacaaacttttcccaaacccgatccgagcccttggaccaaactcgcctgcgccgagagccgtccgcgtagagcgctccgtctccggcgagatgtccgagcgcaaagaaggcagaggcaaagggaagggcaagaagaaggagcgaggctccggcaagaagccggagtccgcggcgggcagccagagcccaggtgggtgcgcagcgcggcccgggccccacgatcctcctcctgctcctcctactcctcctcctcctcggatgccgtggcctctccctccccctctccctcgcccgtcctcttcgccctgcgctctgagcgcccgttgagtcgcgcggtgcttcccctcctgggggccgccgctcacctgggcgccgagtcctaccgggcgcctacgcccagagctcagggcaagggacagcagtcccggccgcaccctcccagagtcccgggagcgcttcgctccctggcacggcccctccccagcgccttagcggctgagcccagcccgggagtgggacctgggctataggagtcgaggctgcgtgcgcgcgtgccccgcgccataagcgctttgcacgggggccgtgtgccctctagcgggaaacgctggaatgggccgcctggagggagagccggtcccctcggtgtgcctggcagcgcagaagtgggtggtcgagcaagaggccgcgtgggaagttagcttcggcgttttggggcacagggcaagcgatgtagagtgcgcgccggttcatcttgattcagtcctgtgctacggagactcaagagcagcggcagggattcctaaaggtcagcgaagcagatgaaatctagtccagtgtcaggaatcagctctgccccaaacaagttctacaaacttttggcttaacagttctatttttcaagacctctgtgataaatatggataatttactttcccaagagatgtaagaaaacaaccgtttatctgaatttttgaacccaattgtttgctggttatctatataataaaatggcaattgaagctttctagaaacaaatcttgtatttcatcatcagaacacgagcatgaacaaaagctttaccttagatgtccctaggaagcgctgatgctttggacattaccttggacaaaagaggcatgtcgaataaatacttgtttatgagtgattggtaggtagctgataaaagaggggaggaaggagatgggggagaatttattttttgcctctgcaattcccaattattaattgatccagatgccttaagtcgcttcgagcgtacccccaacacacatttcatgaagcacttctgcagaattaattcactagtacttgataatactgtggctacagtaatactgtagaagtatttgtcccttgctggaagaaaacaaaccacatttgcttggtcttcttactggtatcactgatagcatttcagaacctgggttattggcagagaccttcagcagagttttgagcaaaacagaaattgaacagagagtaattgtttcaccactggccattcttgtgcttgcttctttaataagatcctgctgatcatattcacttcaattactgatcattgcccctcatgagggtgtattgaattttcccttatttttaccctatattttggggagagaccatagcactttattcaacaagataggaaattggggagctggattagttacctccctgcgtgactttgtctactgtcctttctaaggtcatcatagtacattacggagatttcagacctagctcaaatcgttgtaaagagttattttgggggctcttatcactgtttgtggttgtgttctcctgtctccctgctcattggcttcagaagaagtttctgtggtcctctgtagatggtctaatgaattaagaaggggccagcggtctgaagtagcatcctgttcaggtaataggtgtgcattttgtcaagggctcccagcagcagtaccgtaacacagcaacttgacaagttcagtgggggaggggcaggcatttctgtgccctccagatctcatctactaggtaggcagctgtcttgtgattagctacgctctcttgacacagagcaccagagcttccttggtggctctcatctgctttccagtggtacagcagtgattccctgtaaaccagctaagtcagtatctttaagtgacatttgcttaactgtcttccctgaaaaattggggtgaatttggctgtaggttagtttttagtatatttgtctctgttttccaccagattataatcttttttggggagggactttttacccccttcgaagcatcttgtgctttttaaaccagataagaatatgtattctttatttgattcagaaagaatggtcaacaacttgaaaccagctttatatagaagcacatggcattaaatacaatgcttcagaatcagtgtttctttccttctttgtcattttccttataatggtaagtgccagtgtagttttccttgtcttaggagaattcatacctgatgactataatggtttgtgagaaaaacccacactctaggtttcaggcattcccaaaggaacgacctatagatgccataactctagtattcacacttgccgtgccagcccaaattaggacttaggaggacaagtttctcttgtattgctcccatcttagtgcctgtcagttccaagtttcactcctttcttaaaacagccactgcaactgtctgtccttgatgatatgtatgcaatagccaagcctctcttcagctgttttaacattgcctcatgacagtcaggggagagataatggggtgggatctcagccactcagccccgctgtgtgctatattgtacgcataggcataaacacatctgttggagggaaattttcagggggaaaaggcttctttaactttcatatggcatgagtgactgatatgcgatacatacatggctatttcagagcatctgcacttttatacaattaactaaatgttgaattgcacactattggggctgcagatgttcaacacaattatctattccataataatagctctaataggtcccaagcccttggagtcattgattccttttctttgctcaaaataagcaagctaagaatagtcttgggtgctgtatcactgatccacgtaccaagagccctgtaacagcctgggtctccttggtgctggacctcccatatccagcctcttcatactgattcagctcaacagactttttctcttgaagcctgaattacaaaaccagagcttttttttttttttttttttgacggagtctcgctctgtcgccaggctggagtgcagtgggtgcaatctcggctcactgcaacctctgcctcctgggttcaagtgattcccctgcctcagacttttgagtagctgggactacaggtgtgcgccaccatgcccagctaatttttgtatttttagtagagacagggtttcaccatgttggccaggatggtgtcgatctcttgacctcgcaatccacatgcctcggcctcccaaagtgctgggattacgggcatgagccacggcgcttggccgctttttttttttttttttttaatttttggccaattggtatttgactctaagcttcctttgtgattctctgtcgatatgttgttcttactctgcacctctgcacggaattctgtcttttttctttttcctcttaaataacctgggaaaaattcactatcatgcctagccagattctagaactatcctgtctcccttcactcctggtaggaggggcatttgtgagtctgggtgatggaaacattgagaaacctagtatcccaaataggtagaagcaggctgtgtgtttccccaatgacatcacccacctgtttccctcactaagtggctctgcaggctgaagtgcttgtaaacattcttgcgtataaagtaccctgaccctaacggggcagcctgtgtttacagaacaagaggaatgtccagtgatctgtttcaacctggttacttgtaaccacctagcctatgtaattattaaaaacattaaagattattcacagaatgaaataggacttattttgcagaattaaaatagcaggaagagcggaagaaagttgtatattcagacatgaatacttctcatacccatgaaatggtcagataacactaatgaaaaagaggagaaaaaatatatatagagaaccaaaaaatattagacaaacatgaacactgaatacctactacatgccaggcactgtgctggacacttttatgtttattaatgagggacctgctatttattgaattcttaccatgttccaggcagtaaaacagatgtatattgtgtattttgtcatccgtcctttcgaaaataagaaaattccttgctattaggcagcaagatgccagatggcctagtccttagctcttcagccagattgcctgggtttaaatcctaattaggctgttccttaaatatgtagtcatgggaaagttacttaatctttctgtgcctaaatttcctttttctgcaatatggggataataatactattattattatcatgagggtttcatgaagcttaaaggaaataatccatgaaaagcactctgaacatcaaccaacatgtaataagtgcccagtaatattagctgtctttataaaactacttaagaaatgaattatctgtgtctttgcaaagatatttgatataatttccaaaatttaccttttatggtaaaaaatatccaaagctgacctcagattacagtggttataaatattaatatgtactacctgtaaaactagagaaaagtggataagagtgtcaaattccataactgcatatatacattatgaaaacagtactgaactcaatctaaatattgaaagtagagtgaggtgcaacataattttatctctggcagaaaaatgttgaggtttcaagctatgagaagattttgaaacatgactcttttttctggcaacacttaagagttgatgcttaaacctcactttattgtatagaatacataatcttctcttttgggactcgtataaattgcagcaattgaaaaacaaaagtgtgcaccaacctgcccctcactatctttttatcaagcataacagtatattgccagcaatgttcatagaattgagtgcaggtgtttctaaatataaacaaaataaggaatatattaaattcacatttctagttttttatttcctcctcagccttcctagaatggctataggtagtgtttaaagttctggaagtgtgatagattcttaccaaatcaatgttctgttagcattctccaagtaacaagttaaattggatttgaacagtactgatagtttatcatgttctgttaggatagatgaaaacaaaccaaatgccagtattttgggtgagtcactttatttgctcaaagacgcaaatgaatgaacttctggtagtttagttaaccctggagctccccctcttgacaaatagaaaaaacaaaaaaataaatcagatagtattagcttgaaaacggatttcttttacccagataaaaaatatgccactaaggtacatacaatgaagttttcttgaaggaactaatgatattttggatttctcctaattttgtgcatgtctgcacttgtgtgtgtccttgtgtatgttttaatgggttaaaaaaaaaagcgagctaccaaaataccaatagatgtcagtgtttgtcgctttagaaaaagtgaggtgttagaaaaaaagaagaaatggacagctttatttatttttggttttactaaacataaagctggctacttttcaacaattgactaataattcactgtatataaccctgtttacaaaagtacattttattaaggaaaatattccatgttctcatctttcttctaaatttttttaaaaaagcctctgcagtaaattcccaaaagaattcagaatgtaggcagaaaatatgttaattttttaaaattaggaaacaaaattatttgagaatgtcgttaacacattagatttcttttgcatttttaaactagaaattagatatgcactttcttatgttgccctgattatgactgataaagtgcatttttcagtccaagtcaagtgagatctgtggagttctgcctctacataagagcagagatgatcagaattctcttcattcttcctatgccccatgtcacctttttctggcctccagagggtgctccaggagcatcacactgctattccccaaagactgcttttttcttctctctctctctctttttttttttaagttactgcagtattctgggcaatctactggaagaacagagtcccgattccatacatgttagctgcctcaactggagtttgttttccagctggaccacatagccctaattcattaagtattctaaattagaatattttaaaacattattctgatgatgttgatgcagtggttagcttgcaaggggacatctgtcagattaattccctctaggaatttcccccaagagaatcaagcatctttaaataccttccaatcacgccttacaacagctccctcccactgaagtgcacatggtacccacaaagagatttagtgctatttaagagtttcactctggcattggaaaactataggtgaaagcatcaaagttggacaacagatctttactaacacatttgttttcatctcttcctatctctctgtttcctcaacccaggggcaacaaatgtttaggagccccactttgattgagtgcacatttttgaacacaggtttgagtgactaattcttgtggatcatgggctgattttatttatgtactttttttgagacggagtctcactgtgtcacccaggctggagtgcagtggtgccatctcgactcactgcaagctccgcctcccgggttcacgccattctcctgcctcagcctcccgagtagctgggactacaggcgcccaccaccacgcccggctgattttttgtatttctagtagagacggggtttcaccgtgttagccaggatggtctccatctcctgacctcgtgatccgcccgccttggcctcccaaagtgctgggattacaggcgtgagccaccgcgcccggcggggctgatattttaatatggtcacacaggccttgttatttatggtttacctgcttatgttaattccaccctgtacttgttatctttgacatgagttactctcaggatattactccccttccctttttaaagtgtaatattgttcccattgtttcttgctccaagaaatctgtcgttgatgggaatagtctttgactgccacagtgccccgaacctttcattccacagctttgatgggcagggagctgccttctctgggcagctgtggagttttactttcaatgatatgagagtcacagaatgttttattagattgaatcatatgaaattgtcagttttgtaggtcatacctggctgaatattgtccatgtcatacagtttaatatttggactttgaaaaagtaatttgactttacttattctttacatattctttaagtaataatgacaactttgaaaaagaattatgtacgtttttgataattaaataggattgaagtaatacataaaagaaatctgagctagggataattgaagcagtaacattttttacaaccaataaatcagctaaaatcatatccatattaaatgaatttagcataaaattagaatgacagagcaactagcattttcccttggtgagaaaagtagtaagtttccaccataaaatatgactcatttttatttgacctattagcagatagttgttattgcaccttatcttaaccaccattatttctacagagagattacagagcaatgagtaggaaatatggaagattgctgaataatcctggctttagttatggagtaatatgaaaaaaggaaaagaaaaccttttgttcactttcacagtactacatcaatgcaagctttttagtagttttaatgtatgaattttatcatcaggtgaaaatgcatctcattattagatggcctattttataaataaagttcaaatttcgatatagccagtttttaaaactgtatatgtttataactcatccctttgttgcatataatctcccaattttagagacttacattgcatttttaaaggatagcacagtctctttagcaatcccacagggaatctaaaaccagcctttacaaggagatgtcaaaattccaatttgcagtgatatttttgtcaaaacaagtaacgtgtgttattacgtatagtaagttaacacaatttttcatttgtgtatcaagtaggcattggtttttgttttttggtttttggttttttttgagactaagtcttgctctgtcacccaggctggagtgcagtggtgcgatctcagctcactgcaagctccccccactgggttcatgccattctcctgcctcagcctcccaagtagctgagactacaggcgcctgccaccacacccagctaatttttttcgtatttttagtagagacggtgtttcactgtgttagccaggatggtctcgatctcctgaccttgtgattaacccacctcggcctcccaaagtgctgggattacaggcatgagccactgcgcccagcaagtaggcattgtttttgtgtgtacgtatcaaatctgtttttatatcttttggtattttatctcttttctgccaacagggtgaaatggaagtacagtattgggattatgcacaacattttattgtttaaaattatagtattccttttccattctgttgtttcagttgtttaaaaataagtaacaaaagagaggggtctgtcttgaagcccatgagatggtagatctttagaaacagttataatagcagtcatattgaaactgattgtcatctatttctgggaaaaatattgaaggctggtatattgtccccagaaggattagatgaaatacagaaaatagattatgattataattttttttagtgaggtcaccttgctgtagagttggaaccttcccgggggattgctcatgcattatccattttgggaaagagtaatacttacaggcattatggaaatgagcgggtaggtttgtcaagaggaaaccaataatttgaatactgagttgaatggaaaatgaaatacatgattttccatatattaaattgaatagaaatgggagacttatgtcttgagggtttttcttttctttttttgaaacatgttgatgatattgtgtgttcccaagtgccctcaacctgacaggaaggagaaatgtcaatagaaatagttacttattatattttgatatttagaaaggaacagtggagttttaaatgttgtgcatatcatttatgccccatccaaaaggatagcgatccacttaaaagaaggcagaaaagacaaggaccgctatcgttctccaggaatcaacagaagctaagggagagcgtagagtatagtccctgtggcctctacggagtcatcgccttctcagactgaatccacacaaggccgccttgactgaaagagcctctacattggactgtgcatggcgtggggaaatgtgattacttgcaatatgctactgattacagaataaatattatgcattcggttttcactaaacttaaaaagcccagtgaaaaccccacttctgcatgtggtgaatgtggttatgctgtgtcaggtgaagacatgtttcagtgccttcgtttactttccattaagatatgctgatttccttctcccttatgaaatagaaaaggaaggacataaccatcctgctgctctgccctgagtgcaccagtataggaataaaactctgtaaacagagggtggtggcaaccatctaacagggacctgcatttggacctgtgtgtttgggagagccgcaaagtggctgtgcctctgatatcacaggactctatgaaagaggcaaccaaagaagacctgaggctcttcttgtcattttagatatgtgatttcataaagttactcttgaccttaatgcagatggccatttgggatttgtgtctgtgcatttcatccacagctggatggcatagttgctgagtaatcctgttgctctggagcaatgtaagttacagctgtggccaggcacgtggctcatgcctgtaatcccaacactttgggaagccaaagtgggagatctcttgaactcagggattcaagaccagcctgggcaacacaggagtcctcatctctactaaaaatccaaaaagttagccgggcaaggtggcatgtgcctgtggtccagctgttaaggagggtgagatgggaggatcacttgagcccaggaggttgaggctgtggtgggcaattatgatacaccactgcactccagtctaggtgacagtgtaagacttgtctcagcgaaaaaaaaaaaaaaaaaaaaagttaacaaccatatcaaaagaacaatttattcaccccccaaattgtcttggaattctcacattaatttacagagagaaataaccctttggaaaattcacaatgttttgctagtattagtatgtcatctcactctaaaatgtaaaaaaaaaaaaaaaaaatcactactcagaccttataagaatctggtttttgattatgaatacagcaattcttttttgaaaactcccttgacaaattaagccaatggtggacattctaataattgtcatattttatggtacatttgtaactaaaagcctcttctttgggtaatgactgatagtttcatggaagaagtcattctttttctggtcactctagaaaataagaaatgggaaatgattgtatgtgatatacatatgcatggttctaagtaccaaatttgcagattgcctgaaaatgttcttatgtactttttatggatacaggctttcttttcaattagattcaaaaagtatcaatacattattatactttaaattgactagagctaccttttaaatggtcagataggttttctttttaaagaattacttttgtgattactagccacctgaaatggtgtttcaaggccatgcatggtgcctcatacttgtattcccagcactttgaggggctgaggtgggagcatcgcttgagctcgagttcaagaccagcctgggcaacatggcaaaaatctgtctctacaaaaaaatacaaaaaaaaaaaagaaagaaaaagaaaaaccattagccaggcatggtgggatgcacctgtagtcccatctacttgggaggctgaggcagaaggatcacttgagctctcagaggttgcagtgagctggaatcgtgacaccacactccaggctgggtgacagagtgagaccctgtgtcaaaataaaataaaataagatataaatgaaatagtattttcaagacttggtataaatgcatagctgttaagctgtaaggacatcaataaatgttcataaataggtaactttctacattctatcaccttattttctataatacagaaaatatactttaaattattttatttatctgagtccttttattctttttgcttttttttttgtttgcaagaccaaagtcagagcaatttcaattctattttgagcattttattttggcactcatgtattttaattaaaaaaaataaataaaccattgtcctcagccagaagaattttctgctgagtggtcataaatgcagagtttagcatttcacatctctagaatgtaaaagccacaaagtcatatctgtcttttatgttgtcatatcaccaggtgccatcatggtgctgagaacatagtctttgtttttaagaatttattcagtaactgactgaatgaggaagtatggctagtttgcttaagacattgagttgtaggagttgatgggtagcagtttagttattatgctactgtcagttaataagaaagtatgagtgcaattcagcagtatcagtgatgcatggatttgttcctaaattgttatttttgtggttgaaatttgcactgtttattttgaagctctctgtgtaagtcataatcagtgcttaattattcagactaatgaattggaattagaggtttgctcagtccacaattcttgctaccattaaaatattttgttacatttgtttttgagtacatagaagcaactaagaaatggattaagatgctgcagttaatctttgtaaattactatggccattgcctggcacctaatgtttgctatgttaagagtttgttatatgaataaacgaccgctgttcctggtaggtaatgaaagtaatcttaaacaatattagtactgcctaaaaagtaaggtcttaaatataactacagtagtcctgagaaaaatcatagagtgttagaactgaaaaggttgtcttagaggtcatctgctcgaatctcatctttttagttgaggaaaaccacaaggtacaaacaacaagggcatcaatcctagcactagaacccagatctccagatttcagggtaaggattttaattattaccatgctatactttcagtctcaagatggcactatatatgaattcagcttcacttttatagtgctttgggtgttattatgcttccagataagagagatgtatttctgtgccattgaggaatagcttagagtacctatgattcataggaatttgaaggctgtaaatcaaccgaatctttatatctttttgttccttcttgcagtatcttgtacccaagtagcttcaataaattttgactgacaagatgaccataaaataagtagtcctaatgtcataacatggaaaaggagggtaatgggtgtgtgtgtgaatgtgaattagtatagtatagtaatgagctgcctcagcgctcttaaactttttttagcaccaatgcctttatgcaggaaactctgaaaacaagcaagagatctttgtgggctctctgtaaattatgtgcatgcaaaaaagcatcctcagtgcttgtcccttgacagctgctctgagaccactgagtcactcgcttgcatctgtgagccactgaccagtcactgattgcagtgacagtttatcactaacaacctgaattatctttgacccagagacccaggggtcaaaggcctcctagtccattattaaatttccagggcagtagttcagtttgcattaggggatttgtttatatttatttatttagggtttttggggggtggggggtggaggagcttgggggaatgagacctgcagttattttccccacattataagattatttagtcctttatttgtgggatttggcatcctaaaagaaaggaagactcaaagtattgtggttctggtctgggcctcacatgggtgtcctaaagatttctgggacccatttatgggaagaatgccactctacagattatagcagggaggagctttgccctcaggaagacacagatcctttgagggtggtagagactcctaaagtctgctgattcatacccagctggccccattaacaagagaattaaagagtggctagaaagggactgaagagttcactgggggcccatccaaaaagctgggggtacagacaactgctgattcccagccagtcatggattttattttgagacaggtctcgtttggtcgcccaggctggagtgcaatagtgtgatcatagctcactgtagcctgggactcctgggctctagtgatcctcccaccttaacctcccaagtagctgggactacaggcatataccaccatgctcggttattttttttttaattttgtagagatggggtcttgctatgctgcccaagctggtctagaacttctgggctcaaggagtccttccaccttggcctcccaaagtgctgggattataggcatgaaccactgtgcctggcttgccagtgatggattcaaagtcgcctctgggttgtaaccaggaagcatgcctgggccagactgagagggctgaaggatgacggcatggtttcagtgtgtgagtgtgcatgtatgtacgtgtgtgtgagaatgtgggtaagtgtgtgagcctgtaaaagtgtatcatgagtagctgtctcttgggaggagagggaatcaggaaccttggtcaaataacaccatgtactggcatggaaaggcactgttctgggcagcagtcaagaagacagaggaggactaactgtatatgatttgggcaatcatttaaagtatctgggatttatttccttgtctaataattagcaaggttgatgtagatgaggtataacaactttaggggtagaagaaagctatgattcaaagtcggcattttattagatcagtggtctctgatttggtgtgatgtgttcctggtatgttttcgcttagaacaaggttgtttaacccatggcccatgggcttcatgcatcctaggacagctttgaatgtggcccaacacaaatttgtaaactttcttaaaacattatgagcttttttgtgattattttttccagttcatcagctgtcattagtgttagtgtattttatatgtggcccaagataattcttcttccaatgtggcccagggaagccaaaatattggctcacttagagtctttagtagtgactatgtttttagaaagcctaaggtatttgaagaataatagtcacataaagtctaggcaaatagcaaatttgttttatgtaggaaacagcttatcttctatagaataacttttgatgggtgaaattgtagtgttaatttatcttagtgaacacctagaagatttgtttaggtatgtgaattgtttagtgaaaatgtagaagatggtaagtatatttgggaattactagtgcagaagccttttattaaattctcaatagaaactgggtactggttatgaattgtgatctctcagatacctttaacttagtcgtctctcatgagtatgtgatacaattgaagttgtgggatttaacctctgctgagcagcagaaagatatgaagcagtggaaaatacaggctaaacagagcctttcagaataatttttcctcagtggtttatgttcttcacattcagtttttattcttctccatccttaactttctatagctgatacttccattttggatataggctctgtttcatttccagaggtatctctttccctaaactcatcaagtactttttcaaccttgttgatcatcttaacagaagaatcgtaacattaagttgatttatgacaccatatctctgtagtaactctgaattgtcatcaagctattcattgaaaggatacctcttaaactttctattactaagatccccaaatgtatctattctcctctcgataaaatgagtattgtcttagacaagcagcagactgctttttaagtgaagtggattaagctgctgtgatcgtccctgtgaatgtgtatgataaatcattttgatggcctttttaaatcagagtcaccgagtcccacacagagaaacagagaatgctgtctgtcattattacaataataattaagcgttggctgataggatataaagtataaatcaaagatcttagaggaaatagatgaaagaaaagctttgtttctcaaaaacttaatctaaaagaagaaatattgagcaagcattgggtgcttcatgaatggcctaaaaatatatttaagtctatcacctggaggttcgttcatttattgccaggaaagaatcaatcccacttttttttctctttccctgtggctcaactccaggaaggtgttttaattgattggtgggaagattttaacacagacaaaacttataagctaagcatcattatttctagtacagtggcttcaccacattatagggtaataaagttaaaagctgccgattgtttcagaattattttcagaaatttacatcctctttattcctattaccttgagaaagagttcagagaatgggcttagtcagcatgcaattatggtattagataaagcatacagtttggtctaaaaccaagatgcagctagtctcatcagggtactttaatcaatcaagggttgttaagaaggtaggaatgtcagtctaacttcattcctttgaaggtgatcagcctttcttctctggaggctttgaagattttgtcctatggctgggcgtggtggctcacgcttataatcccagcactttgggaggctgaggcaggaggattacttgagctcaggagtttgaaaccagcctgggcaacatagaaaaacaccatcttcctctccccactaccaaaaaaaaaagttagccagttataatggtgcacatgtgtagtaccagctacttgggaggctgaggtgggaggattgctggagcccaggagtttgagggtacagtgaaccatgatcatatcactgcactgcagccagggtgacagagaaagacccagtctcaaaaaaaaattgttctccaacaaatcttttttgaagttatggcatttaaccctgcccaccattcccattcccctgtcagtttcactatcatgcattcctttttctttatcccactcaggaccattgggcttgtcaaacatataaattggctttcaggaaaattcttctccatatctcttaaaaatttcctgtatcccattctcttccctctttttggaattttctttttctataatttaaagatagagtcttgctgttttctaggctgctctcaaactcctgacctcaagcgatccttctactttggcctcccagtgttgggattataggtgtgaaccattatgcccggtctagaactttaactaaaagtacgttggaccttctttctctgaacactggttctttttacttccctcacgtttcccatcattttgtttcactctcccgctgtatctcttttgaagttatcttccccttcactcattgactcttcagctatgtgcggtctgctgccaaaaccatccatgaagtttttcatttcaaggactgttttcccccctaaacctagcagttttatttggtgccttttcaaaccttctatgttgtattttatattttcaaggtccctgtagatatttttcaggttgttatttatttcttttagcagagtaagcctagttgtttcataatttctgtgtggtaatttcagtttgtgttggttctcactctctatgccttggttccttctgtgcttgatggttggtctctgaccctgtgttggccattgctctgtaaaaattatctgtgtcattcctcaaggcatgggatagaagcacattcctgccgagaaggtaagtgttactgctgggtacttggaaacttaccgagttcgtggcttgaggttctgtggcctaccagcctgtgcacacctaggcatgtagaaacctgtcggtagactcagcttttccctctggctgaactcaggatcaagacaatgtgtctggccggacacggtggctcatgcctgtaatcccagcactttgggaggccaaggagacgggtggatcacctgaggtcaggagttcgtgaccagcctgaccaacatggcgaaaccccatctctactaaaaatacaaaaattagccgggcctggtggtgggtgccaataatcccagctacttgggaggctgaggcaagagaattgcttgaacctgggagggggaggttgcagtgagccgagatcacaccacttcactccagccacagaacatctcaaaaaaaaaaaaaaaaagacagcatgtctttagttctctggggctaaatgggtatgtttagatttggtgtagcttttttggggttctttactccttttggggtcccagcttaatgtgaagagggtctactctaagactccccacttcaggaagatcctggagcctctatccctttctccaggatgagcaaatgcacttgaagaaaaagtagttgctttgtccaggtattttgcgtctatctctaaggtttgagatttgccttagaatttgtccaaaaaatgatcttttttgtcaaattcttttaaggtgatgtttattatatttcattcagcacttttaattgtttccagccaggaggttcttgtgagaaacttaccttccaggaatggaagaggaatcattagtcattaaggagctaaaaatgttaggaaaatattaatgcttcagaaacaatttgttgatctgaagagtacctaagttagggattttcagaaagtagcattttgttttgttttgttttgttttgtttgagacatggtcttgctctgtggcccaggctgaaatgcagtggcgcgatctcagctcactacaacctccacaaacgattctgttgcctcagcctcctgagtagctgggattataagcaggcaccaccacacccggctaatttttgtatttttcgtagagacggggtttcaccatattggccaggctggtcttgaactcctggcctcaagtgcccacctcggcctcccaaagtgctgggattacaggcatgagccactgcacctggccagtagcattctttggatgaattgactctggttttgttagccttcagaatctaaggaagtttatatctggtcaattttgagaaagaagatctctaagaaatgcctcaagtggggaagggatggactttataaaccaaaatgtcaatgtgttaatcctaaatatctcaatgaaatggggcaaaatatggctaagaaaaatttgacaaggtgtaaatctcactgaatgcagttgctgtggttgctaccaagtttacaagagaagaaaccaggttttgccaatgcatcaaaaattagattaaaaaagaaatttctctggcctagtctgatgcttagccttcaagagtaaaatgatgtgttgttagatgacttgaccaaagtcccatagccaaggcagggagagtgttgcagcctggtggtccattatctgatgccactggatctatgtagatgagtttggaacttcactttctgccttgtctgggacgtaaaaactttgggtgcccctcacttcttttttatataaactgttgtgttttattgccctggcactcttaagttgctgtttcaccctagcagtgcctgcttcaagccatcaccaatgaaagtgcctttgaagtgtcttaaggcgtgtgcattgcctagacaaatagttggcagaagaggtcaacacaagcgtctttgctttggagtgtcaattgaagaaattgtttttccacttgaattggcagtgtgtgctcttactgctgttagagttctgggcagagaagtagatgtgataattatgaagggagaagggggaagaacagctgcagaatgcagggaagtgactggactccagtaatcatatttggcaggtcaagggtgagatttagcctgatgggatttggaccattccctgggctagaaagtagtgttaaaatcaactccaggtgtttccgttattcttaaggcctaagtattattaaagcagaaaataatatggttaggatatgaatgggaggggattggtcattcgctgcttgggaatcacttatttgcaatagagctcattctctcttgacagttgctcctacatgtctaaaatacaccataaatctcgaagtgctcgtttcaatattgaagtttcctccaagtgagctgttatcacttttgtcttcaagagaatgctaactcactgaatctctttgagctttttatgctttacactgtggattttggagtttgctttggtttttccactagttctttaagttaaatttaggtaaagaaatttaaaatcatcaggcttattcttaaaaactcaagtattatcaaatgatggatgatagagatatgctttgggaatatatccaagtacttcaaatgatagaagttagaacaccaggagacatttagtaagagattcttctgctgggtgaaatcaacatcaacatcacctggaaactcgtgggtagtgcaaatcccctggcctcaccccagagctcctggaatgaagctgtccgggatagggcccggcatcctgtgttttaataagctgtttgtgggattctaatgttcgccaaagttttaggatcatgcctgcagagaatcctgctcactatgaaagtttgcatgcctgagtaagtcaaaagagatctttgaaaatagtatctaggtttgagagacttgctgtgattgtataattttagcaaatgtgtcaaaacaaatttttacttgcaggcaatatcttgttagtacagagaaataaaacaaacaaacaaagattataaataagaacaaaagtaattcatccaagagccatgtgaaaatgaaaatccttgaaatggaaaaaaaaaaaaaagtttttcagactaccctgtggaagtagtaagttacattgaaaggccgaaatcagccaagatcattttttgttgttttgttttttgttttttgagacagcatctcgctctgtcactcaggctggagtgcagtggtacgattttgactcattgcaacctctgcctcccaaattcaagcaattctcctgcctcaggctcccaagtagctaagattacaggcgcacaccaccacacctggctaatttttgaattttttgcagagaggggttttgccatgttggccaggctggtcttgagctcttgacttcaactgatccgcccaccttggcctcccaaagtgctgggattacaggcatgagccaccgtgcctggccaggccaagatgattcttgaagtgtgtgtgctgtgcgtactgtgtgtgcatgtatacgtacatttctgatggttcactttagtgatactgtagttcagtttatctgggattgcctcagtagaaagctatactcttacttgtttaactttctgtctattttctcctttaaaaaagaaaagattatatagtagacttatacttggtatctgtctgaaaaaaattatatgaaaactgtctttattgccagggaagcacttgtactttcttttctcatttattcttttctgcactttaatattacagtttatttgcttctggctttctttcataatttatcagaaatacaggcttgtatagaaatcaccattttttaaataaaattttatttttattaaattattgtgagctcattgttttttaaaacaatcatacacaagtaaaacatttaccttgggggtgggcatcagttccttttcccatccgttttcatctctagttttctttcctaaaaacaagccctctcaacaattctagttaattctttttctgatagttatcttttttttttttttttttttgagatggagtcttgctctgtctcccaggctggagtgcagtggcgcgatcttggctcactgcaacctctgcctcctgggttcaaccagttctcctgcctcagcctcctgagtagctgggattacaggcacacaccatcacgcctggctaatttttgtatttttagtagagacgggatttttaccatgttggccaggctggtctcggactcctgacctcaggtgatccgcccaccttggcctcccaaagtgctgggattacaggcgtgagccactgctcctggcctctgatatttatctttatattttctatataacatgcatgttctgctgtttcttttttaaaaaccttttattttaggtcttataggaagcttgtgcattcatttattcaacacataattattaagtacctaatacattctgtacattgtgctaggttctggaaataaacagagaatagaacagacatgattcttatccatggagagcttatattctaaagatgctaggaagtacttttaaataaaactctgacttatatataaaaacttcagaaaagaaagggcctgcttttaaatattttttttggtgttgtccactacttgaacttcatcaagttcatcagaaaaaatttaaatggtatttctaaataagtggtttgctccactctatcattaagcttgttaagatgaataaaaatcagaatattttcaaatgtatgtaaatacatacattcagtgtatttcccagcttcagaaagtcctaatttctgaaagtccttgttatcaactcttgttttgaaaggaccctttctttaagataaagtgtcacatacattattttgtattgatacaaattattgatgattatggatattttaggtaatcaatactaagataattatgttaatatgaattatgattatagggtattggtaacagacaggagtgtaggtgaatgatatgaatttgcactgagtttgtcatgcccagaaagttaatctgagccaaatttctaaaaagtgccttccttattccatattatgtatgaaagaagagcatagtttatgtgtgaatatatgggcaacatgtatatagatgtccacatgaactgcgcctggttaggtcctagaaaagcctatggtgggaaaggtgggttaagaggattgaagttaggagtgaacttgttatagtcttcataaatatttttatagccagtaacataaaacaataaagacagtgctccaaattaaagatacagcaatgacatgacatctacatttgaaactagtaataatggatgccgggccctattactaatttctgcttagcattccttactcaccagaaatgttttaggatcttagttcctttgcagcttgggatgcttgtaaattcacttgttcttttataaataatgtgcatacaaggagattttcaacagcattttcttatcaaaggtctgggcctatagtcaaatagtcaatgccatcgtggttttacagcacccatgaggaggtgttgacgttcaggttttagcttcaggattttgacttgtgtcttcttcctgcttgggtcctgtctcttcccacctccccagctcagccttcatgtacgaattttagattcttttgccttcgtatcagccagcagaagctagttttttgttttgttttgtttttttcaaggcctaggtttccttttactcacatctttcttcaagctttatttgcaaacacctccattcctcttgccattacttttgcttcatgtctatttcaaaactctgtttcatctttttcttgttactaccaataggagtaaattgagtgacttgcaattaaggtacaacagaagcagaattttcaaagttactcaaaaggaataggtagaaaaattcccatggtaagacaactcagtaaataattacatacaggcagtgaccatatatgctcattttaagttacaaatatacacacatggccataaaaatagtcagagactgagctggaactcaatccgtaaactgattccaaaccccatgtaatttttatacacagtttattgctagctttttgtccttttatgttcacttttatgtcctatcttctctatattcctaagttgcccacattttaaaatctgcctgtcttctgactttttaccacaagtgtttttttctcatccacttttattattctcatttcctgttttcaaagaaacaattgcaacacattttagaaatgcttacgacataagtggcacactcctgaagtctttccaaaatctattttcctccatgtcttaatttttgaaatttatatacttagcttctttctgctaattcccacagaaaaactcagcacaattttataagcaatgtgaatgatcttagagccctcataggaataaattgcacagaatgttatcaatatatcataagtgaggtacaggattaattttctaagatatcatttaaaatttcttctattgttactatacacatttgatttattaagccaaaacttcattcctctaagaataataatcccgtcacagttctaatcctagcatagtgtcgtcttaactgcaatgtactatcctaactttcaattacatcttatttcagctttctttattatacagtagctaaaaatcattgatagttataaagaccataatgccataacctctcaaatttaaacaggatagaatattttatgttactaatacagcaacagaggcattttcctctgttgggtagatgcaattattcagattccaagtggttgagacattccataattatgtctctaattttacattctacaggcctcatttcctctgtctgataactgtcctcacccaagggtttctacaaagtcacagtttgggtgaatctgtcatctcattttttcaaagaaggaaatcatcatcaaataaaattatacacaccaaataaataaatatcaaataatatattaatctacaaatttgcgacatatttattttctgactttgaggttaatttcgccaccatttttcctaatctgtatatcctatccccacttgcaaacaatgttttgcctgaaccgagtaatggcaacatttatcgtaagtatatcttagcttcttctccttatctgaatggggttctagttcccttagcattctcagataacattctgaatattctactctgtatatccagtttgttcatagacctcaaaatgcagaccctgcatggattattcccattctgctgtctgtctttatgaaacctgccaatacttattgctagatgaaattctacagatgttccatgatgacttattgactcgataacagggatctgcaaacatttctgtagagacccaactctgcagttgtagcacaaaagtagccacagacaatttatgagcaaatgaatgcaagtgtgctccaataaaactttatttacaaaaacagatggtaggcaggatttggcttatgagccgtattttgctgacctctgctctataatattccttgaagagatactattatcccaatatcctgacataaaatatatatccttaccatttgctgtagcaatattcaatttttctttacctggcgttgcttatgttctccagccagttctgtcttttcattaggaatctgagttaggatttcttagaactatgtatttgggtaagtttatcaaaggcctttttatttttattttttattttattattattatactttaagttttagggtacatgtgcacaatgtgcaggtttgttacatatgtatacatgtgccgtgttggtgtgctgcacccattaactcgtcatttagcattaggtatatctcctaatgctatccctccccgctcctcccaccccacaacagtccccggtatgtgaaattccccttcctgtgcccatgtgttctcattgttcaattcccacctatgagtgagaacatgcagtgtttggttttttgtccttgcgatagtttgctgagaatgatgatttccagcttcatccatgtccctacaaaggacatgaactcatcattttttatggctgcatagtattccatggtgtgtatgtgccacattttcttaatccagtctatcattgttggacatttgggttggtgccaagtctttgctattgtgaatagtgctgcaataaacatacatgtgcgtgtgtctttatagcagcatgaccttttaaagatcttaggagcataatgctgtaacctctcaaatttaaacaggatagaagattttatacattactaatctggttgggtagatgcaattattcaaattccaagtgggtgagacattccgtaattatgtctctaattttacattctccaggcctcatttccctctctcatttcatcaggtcttcaaaaggcttttaataaacttacccaaatatataattctaagaaatctcaaattcagtgcttgatcagatcactgtgtggtatagtttgtatatttttccccacccaaatctcatgttgaattgtaatctccaatattgggggtggggtctggtaggaggtgactggatcatgggggtggatttctcatgaatggtttagcaccattccttggtgctgtcctcatgataatgactaagatctggtcattttaaagtgtgtggtctctctctctttctcttgcttgctcgctcctgctttcaccatgtgatgtcccccactactcctttgccttccgtcatgattgaaagctccctgaggcttcaccagaagcctggcagatgccagcatcaggcttcttgtaaagcctgtagaactgtgggccagttaaacctcttttcttgataaattacccagtctcagttattttttacagcaatgcaagaatggcctaacacaatgtgtaatctttgtttcatagagtttacactacagctttgccacctaactctcctatgttagtacatagaatttctgaaccttcaatcctgttcagaatgccagattgtgagagaatcagttatgcttcaaccttgaaagcatggagttctctgctttcagggaactccagatgactcaggaacagaagtaaaccctagacaaatctaaagccaaacatagaataaagctgaacagcagatcataaatcccattccttgctccctaggaatacctcttcttctaactccagcttcagatttttccccaggtttcacaattgacctttgtcttagtgtccatactggttggacatacccctctggcatagacattcatgataggcattgccattcttcatgatatgtcattcttggctacttcctctttttctaggatgcatgttttagctcacttcatgttcaattgccttgtggttggcctacttcttctttctcttctttcctacttttgtggttgctttatagttgactaattactagttcatcggctctgcttattgcctaatactataaaagttcccttcctggaagggttggggatgggaaagtgggggtgggtggtagtaaaattaactaaactttgtagtgggctggagatagggcatgagtaaaggaaaagttgtattttaggactgctcaactgcatggatatttatactttttaagacaagcaacattaacaaagtctggatcttaaagtagagatctacactggagataataatatccctgtgggcatttaatgctcatggttacctagaaaataagtataaagtaggaaattttgagagagtattcttgtaaagattaaatggtgacaccaatgtaaggcttgaatgttctaataagggtgaaacttggtctgggaatggcagttcttacaccttttataattcttaactgttattttttagatctggtcatttaaatctgaggacccagatatgctagtcttatagaaagcacaaatttaaaatgggttctttgtcttacatagctctaaagtttaggaaaaaagtatcttcaagcaaccttcataggaattctccaaaataaatgtgttcctgattaatatgtgttttattttttaaaatttatttttaattaatttttaaattgacaaaattgtatgtatttatggtatacaacgtgatgttttgaaatatgcatacactgtggaatggctaaagcaagctatttagcatacgtgtcatcatctcacataccatttgtttgtggtgaggacatttaaaatctactctcttagcaattttcaaataatgtaattattttaaatcagttgtttaaatattatgaaattactttcagcccttagagaatagtccatctcacatgacacataaaaatggaaggaggtgtctagctcaggagaaactttttggaatatttgattctctttccctcattttctcttctttttttgttttttaaaaaataatttttaaaccctgtattgactcctggctattattttgaatatgagtgctaacaatttgagccttgtagataactatcccaatgccaattgaaccataattttcatttgtctctttctacaagattctgaattttttcagaagtgaaattaagtctcaattccctataatttacccagggcaataaatcttaaacattttttcttaaaaaaacaaaacaaaacatttttactggaaagactttatggggtggacattaactctgtaaatgccatataacttttggagagggctgcccctggcacagtgtaatatttatgagaaagttgtgcccatactaaccacctgtatgagaatcgcctgcgatgcttttgtttaaaaggcagattcttttttccctatatttttctctttttaaaaaaataatttcgacttatattttatatttatatttatattattttaaaaaataatttcaacttatattttatattcaacctacgtatgcaagtttgtcatatgagtgatattgcgtggtgctgaggtttagggtacgaatgatcccatcacccagatactgagcatagtacccaatagttggtttttcaactcctgttccctccttccctccctgctctagtagtccccagtgtctgtttttgccatctttatgtctatgagtatttgatgtttagctcctacttataagtgagagcatggagtatttggttttctgttcctgcattaattcgcttaggataatggcctccagctgcatccctgttgctacacaggatgcagtttcattcctttttatggctacatgatattccacagtgtgtatatactacatttcctcaatgcagtccaccactgatgggcacctaggttgattccatgtaaaagagcatattgttaggcttttctctgaattactgaatcagagtctttcaatgggttccatgaatatttcatattcattttagtaaacttgctcaagtgacttatgtatacagttataggtttgggaacctctggcctggggaagttgtctgcaacaccactgacaggtccctgtcctgccacagacatttctgctgtaactccatgcttgcattttttgggaaaaacaaagcaagacaaaacaaaactcattttgcaaaatgacacacaaaataaagaggcttctggaaaaagtagggctaggtgaagagaattcaaaacttacgaaactataaactgaacaccaacaagaataacaatgaacctaataaaaaactagcatagttatggctctaacaacatttattctcaacaacttagttaaatcgttgtacccttaaaccttaacactttttttttttgtttttcgagaccttggttcttgaggacattttcttctagcagaaatcagtattaacttctttatccatctctctcttttttttaaactgttatgtaccatcattatagcacttcttacaaaaatgaggagctgtctttgtaacttcatctgtgccatcagcttttccagatagtttaacataaaaggaagatgaagtggttctggaagcaagaaaaccagccaccacttgcagtaaggaaggcaggtctatgggcctattagctcatggaggtttttgtttgcttgtttgtttgtttttgagatggagtctcacacagtcgcctggtctggagtgcagtggctccatctgagctcacggcaacctctccctcccaggttcaagcgattctctagcctcagcctcctgagtagctgggattacaggcacctgccaccacgcccggataattttttgtatttttagtagagacaagatttcagtatgttggccaggctggtctggaatgcctgacctcgtgatccacccgcctcagccttccaaagtgctgagatcacaggcatgagccaccgtgcccggccagatctttttaaataagatcttcatgtgttataatactaaggttgtctctttaatcacaaaaagccagtcctttattgcttcaaattgttcatgtgctgatatcatatgtctattgaggtctgacttactacattaacacacgctggcagaaccactgcagacattctctgtcctccttttttttttttgtcactaacatgataaaattcttaagggtttgaattctcagaggtactgtctgatggttaaatcacagaggtccactgcattgctgatagatttttttttcaccacagtgctgacaatacaattgttcaggaatggccttcatgaccataaggttggtttgacctaggttcttaattgtgatgtctctatagcttttaacttatttcaggatgatttcccccattgcaaatagataattgttcaatagatttgctgcagacttttggacctgatctatagttttcccttgggatatgtaagatatttgaggtacaccaaagtaatgcaagaaatatctttctttagagctagagtttagacaggaagtatgtcatagaactatggtgtgtccttcccaagtgagggatttcattagaccttgacttagaattgaatgtaatgttaatctgtaaaggcttgttgtgagggttttgcttaaatttttaggtttattaaatttttaggtttattaaaattcctaaatgatgatatttttatcagcaaagacaaaaatactgctacttaagtagtagtcactagaaaaataatttattttgttttgttaccttaactgtcagatttaagcacattcctaccaatatttgggtttgggctctgaaacccaaaacttttgaaagctttggaaaattttgtagaagttctttcttctgtcttttttttttttttttttttttgkatactattgccactgggatgcaagcattcataaattatgtttaaatataaaaattaggtcggtaactctctgctcgtggattcctgaaacacaatgtacaaaaacccagaatagatcttcgtggctcactttagagcgtaacagcactgggaggtgatctgacttttcattttacacgcaagaaactgaggctggagagaaagaagggttgtctgggtcacaactgttgaggtcagcctctgggattgaacttcatttcctgaattcctcatggttttccacctccattcctcagcttctgtgatccctttggtatggggctgtttcttgaaccttgaataggagggtatggaggtgaagtgacatgtgagctaattcttttacctcactctggtttatctatttttatgtactaaggtcctgtgtattaattaatgagatgagttccacagttgctaatattagaaaatcaacacaattgatttctccttgggaactgtattagttttctattgctcctgtaacaaattaccacaaactttgaggcttaaagcaacatgagttcatgaatttattatcttagagttttaaatgttagaattctgtgaggagtgtcactgggctaaaattgaagtgttggcagggctgcaggaggctctaggagagaaatcattttcttgcctttttcggcttctagaggggcttcccttcctcttacttccaagccaacaacatgacatctctgagtattcctctttaactgcaccaagggaagataatctccttttaaagattcacaccgttagattgggtgaacctggataatatagtcagcccttcctatgcatgagttttgtagctgctgataaggaggtcatctgtaagcaacttgaacatctatggattttggtatctgcaggggatcctggagccaatcccccacagttagtgaggaatgaccatatagcataatttccccatgttagtatccttaatctcaaggtctcaatcatatctgtgaagtcccttttgctgtgtaaggtaacatattcacaggttctggggatcaggatttaggatctttgggagccattattctgcctgctacaggaatgaatttgtttccacttgtctcaactctaagtgggcagttatttaaaaactttgtattaatttagagagcttcataaaatgctaaaattttctgagaacctaagtgataatataagaagaatagctaccaacatttgttgagtgcttgcaatgtgacacacactgactgctatgtgctttaattgcaatatcttatctaatcattttagtagccctatgagataggttctatttcatttacattttagaaaatgtaaaatgaggcttagagaatttaaataatttgtccaaggtcaaacaactagcatatgggagactaagacttgaaattgggtttgtctgacccaggcttttaatcagcatattgcactgtttatatgtagctctgaagtggtaaaattgtaacatagtgtaatgcagtactgagaatataatatcttagtaatttttaataaataagtgttttagtaaggaaaataagttgttattaggaataaacactttctaaatgacatagtacccattgagcagtgttcaactgattaatattagttggttatatactgatttagtgatcagttctcaaagcctcaatttaaatagaaaaggagttatgtggaatttaagtggaaaggatatagctactttaacaattttttgtgctctcagattgtaaagaggaaggatttattttacaaataaattgcttgtgaaagaaatttaattggttaataaagtctctatctcttgccccctaaccagaatgtcaactccaggagaacaaggatcttggttttcatactcaattctatatgtccagtacttaaaacagtgagagcaatgtaactgatgcacaatgatatttgttgaatcaatgggtactgacaaattcctaagggaataaagccagttatctacatgaataaggcaggatctagatactagctgcatgccagaagaagaatatagagcgttctaatgtgtttggctaggaacagaccatatcatgggctaatatgatagagtaataaaggtagtgataaccctgataaattcaatatgtttttacataaatcctgtgcattaaactagtagctcacttgatatggagtgtttgaatcacagattgactttgctcattcgttcttccattcagtcaacattattgagcactgtgctagttattaggataaaagatgcattaaaagaataaagcccctaacttccaggagcctctgtctcctaagtgaaacaaacatgtgtaaagataaaataccttatattaaatggaataataatggttttatagaaacatggaagagggatacttaacttattattcaaaagagacacttattcgaaagacataaattgagtttagtcatcttgagttttagaagaaataatttttgatttatggagggattgcaaatataggacagagagttctcctataccctttattcagctcgtttaataatacatagctttgctatattgatcaaaactaagaaattaacattggtacaatactattagctaaactgcagaccttacttggattgaaccatcttacagccttttgtgctaaagggaaattgtgtatgaaagtgctttgtaaacagtaggctaaatagtggtagtctaagaagtgccatctggtgagcccagggtaggtcactgagggtgaaagttgcattctctgaagggagctttaaataatctaaccatgaactctattttattttattttattttattttgttttgttttatttatttttgagacagggtcttgctctgtcacccagactggagtgcagtggcatggtttcagttcactgaagcctaaacctcctgggctcaagtgctctgcccatctcagcctccggagtagctgggaccataggcacatgccaccacacctgggtaatttttgtattttttgtaaagatgatgttttaccatgttgcccaggctggtctcaaactcctgggctcaagtgatctgcctacctcagcctcccaaagggctgggattacaggcgtgagacacggcgcccagcctgagctctctatattttagtttcctttaataacatgatcagttccacccatgaatttaattaattccttatgagtttgctattaaaataaaatgagcggttattgatgcttattgtgtgtgtgacagtatcctattcaaagtatgggatacagttctttgattctctcactccatcctgtggaaggtaaacttaccttgcagatgaggatgaagttcacctaggtaatagatggacttggccaagccatgagactttaggtgggaaaactggaatcagaacctgagccaacctgacttcaaagcccaagttttctcctttgtgttgtctcctgagtcattttcctgtatagccccgctgaataagcattttccaaattatattttgtattgtgcaaaacttcacttccttttttattcaaagactatgtatttcatgcttcaaggttttctgagaactgcagtattctgcaaattctcaaaaaatgcttttgctctttctaagatttcatgactttaaagaacagttactttcttcctggccttcctggtgtcagtctgtatgattctataatgtttagtgtattcctttatattggctgccctttcctttgagcatttcggtaacttttcttgatagtttccagctactttttttttctttttgtctctcaagaatgaccaaaagtatatgtagtttttcagatatttgtcatgtaatttcgtgccatctagatttatataacctaacattttctggctttttcttagatatttatagatggtggtggttaaatcagagttaataatattaatttttaaaatatgcaaaatgcttttattgctctttttaattaggtttttacaactgtattgaaataggtgtggcaggtgctatttcccctcctttttctgctcaagatgattgagattcagagtaattttgtgactgcttcatcctgcagaccaaacaagtactttacctaagtttcctgtctccattctttttgatagggtctatcaagcttgtggcaaaagctcaagatgttatgtgtagagttcagtaatttaaattcatggacttataaactattaacaaagaatctaattaaccttctttctaagtaaaaacaaacaaaacaaaagatacttctagtagagtgccagtgtctttagggattcatggggaattaattaaattcatggttggtactgatcatgttattaaaggaaattaaaatctagagagctcatggttaaattgtttaaagctcccttcagataatgcaaatttcaccatcaatgccctaccctgggctcacccagaaggcatttcttagactaccactatttagcctactgtttacaaagtactttcatacatgatctcattgttcagcacgaaaaaagctgtacacaagttggtgcaatccaagtaaggtctccagtgtagctaatagtagggtaaggaaaacgatatgttgacatgctaagtgagcttcattttgacttctttcgtgtaacatgtttgagtctttgtgctgagaaaattgtattacattctgggagtcagtgggttgtgtcagaatgtgtgggaagcagctcactttcactttcaaaagattctttaaggaatttatgctttttgtaaaataggggagactatttggactctttcttattgggatttctttttgtgtgttttatgagaccaaagggcactgacttccatcatacggtttgactttggaggacagtacgggaaagtgcagcagccttgtagttatagtggccacagaatgtagtcacagaataatgtagcaccaggtttcttactgtcaacaatctgtttaatttgattttggttattttccacctcttcagcaaattcatgtcactgggaaccctaagataaggaatttgccttccctgatcttcctgtggggtagaagtaaaatgataagaattcaatcgttaggttgtccatggacctgcttaagagtgcaaggaggttttaaaggtccttagaaagtcaaatgtggaccctgctgaagaagggatgcagcgttgcttacttaaaactgtagtgaacagagaagagagaaatttaactttgatattgtaggcctcaacgagtaaagaaggctttcaatcctggcaggtactaaggttttagtatcattctctttaataagtcatctgtggacaaaaatgaaaaaatcagaaagccataattactaagaaaggagatctgactaaataacaaagaaacagattttagaagtcctgaaaggacacatttgtttcagaattagctctgctaaaatttttctttttcacagaaggaataagctttaaatggctatgtgaaaaatagattatagggaactaatgttcttagatcatgaatcagggactttgttcatttatatgcactgcttaaaagttttcacatagttatcattgtttaaaactaattataatcaattgctaactcatcttacctgggaatttatttagtttagaacatgtaagtaaatttctttaaataaaaaagagaattttagtggcatgaattaaatgtaattcaacttgagcaaagaagaaatggttataaagacaaatattaacatatcaaaatcatgttaatgtgctaactttacctaagcaataaacacatcagaacagaaaaaaacttgacaataagaaaataagtaaatatatttttaatttttagtaactagatgtttctcagtttttctgtttaacattttggaagtgaatatggctggtatgtataatgcataagaaaaaaatcctgttttatgacaatggaaaaaatcatatttataagcttatgtcatgtgaactttgctacacatcaattaggtaaaactgtactggatccattttaaccctgtgagttgattgctttcagtgaagcttgctggacatctttatgtccgagagtgagatgttcttataattaggggcagctgtggtgacagaatcaattaggcaggcctgctgaacacttaccttccagctgctggccgcggcgcagtgatttgctccagcattcattgtcacggtgtattgcctttacacctcgaaagaacaacattaatccattaagccacttttgttgctgtatcctcacgtgggggttatcacatcgcagtgaacacaggagtgagatacagcactgttcacccttgtggcatttggcatatgacagatagacagctgcatagttcaaaagaattattttaacaccaatcgcaagtattgccttgttttatttccccatcaattatccaagtagctcagaaaattcagcaattttgcatatctactgtatttctcagactgtcttttgcacgtggaataagtgcagaaataatgtcatgtggtgtatcccaggttttgtgaggaaaatatggaccctattgatagatcattaaataaaatctttagcacattgtctggtagttaagagccagggctctggagtcaaacttcctgggttcagatactgacttgatagtataccagccgtgtgactatagacaggttactttacctctctgtttctgtttcttcatctgtaagttggtgataatggcagtaatacatatctcctggagttatcataaaacttaaaaacgttaatgagcataaagctcttagaacaatgcctggcacatagtaggtactcaagtatcagctattattattcaaaggtgtttattgttgaaagtactatatatatatatatatatatatataatgtgtatatgtatacattacattctactatatatactatatataaatatactgtaaataaaaaggactttatttaacttcatctcataggctttggaaatacattatagttgttttaagatttttatctttagtccctaactgtgaagtacagggcaaggaactgtatagaaaagagagattgctaatttcaataaataactaatttcaattatcagggtgaaaaattatctcacctaataaacctgcattcattttcccttgtagaattttacagtattgtaaatttctcacagacaaatgtggagaggtgatttggtttacatagctcattataagaacaaaaaatttactgtagtggctatgaaatggagtgatctttcccagatttttaatctactgtccttctctccattttctgcctccacttcaaactttgtagaaaaactaggtatggtaaaaagtcctaggtttaagttttggttctgcaacttgttagacttacgacattaagttcccctatcagtttccatctcctcacctgtaaatggaaacaatcattaggtaccttacatgaaatacacaccagaactgttgcagatgaaaggagatttgaccaaatagtaattttgcggatatgtagtgacaacaaggcacattaacagttaagggagcaaaccagcatcttgtagaccatggtcaatcaatggagaagagcaactttgacttgagggcataggaggtatggtggctgacacttataatcccagcactttgggaggctagagcaagaggattccttgaagaggattgcttgaagtgtttgagaccagcctgggcaacatgaatctctgtatacaacaaaacaaaaagcccagcgtggtggtgtgtgcctgtgcctgtggtcccagctatgtgagaggctaaggcaggaggatcacttgagcttaagattctgaggctgcagtaagctgtgatcacataacaccactgcattctagcctgggtgacagagtgagactctgccgccaaaaaaaaaaaattaaagcagagaaggtaatgtgcttttcttgcaataatacaagaaccgtctgaccactctgggtagactctgaaattaggtgaaataaatgagctagcaaggaacatgaccagggtctcggctgaggcagggtccagtttgagagtcctccaacagtgatggccagataagagaaatacagaacatgaaaacttcaaagtaaagataatacgacttacttgacaattttccagttagatttacatgtcatttttgttagtgtctgatggcagagcggcataagagtcctagcccagtggcatgcagaacacaaacaatgtcacagggcctcacgattccaaataataaaaagtcatagagaagatagatggggcctctggaatcattttgtacctgggtttcttctttgtcagcatcttccagattcttcctcatcctttcagcagacacttgaagtcctactttgggttaggagagcctgagatcctgtatatcttccattcaataaattcagaaattttgatgtttaggtatagtatcaatccaaatggacacatacacagtcaggaaatagcctaaccctccaaatagagactgtgaccccctgctattaacttgctgacccttgtttgatttcgtagggataaattccttgaatggccctctgtttgtacatgtgggtttttttgttttgttttgttttgttttgttttgttttttgagacggactcttgccctgtcacccaggctggagtgcagtggtgtgcccactgcaatctctgcctccccagttcaaatgattctcgtgcctcggcctccctagtaactgggattacagatgtgtgccacaatgcttggctaatttttgtatttttagtagagatggcgtttcaccatgttggtcaggctggccttgaactcttgatctcaagtgatccatctgcctcggcctcccaaagagctgggattgcaggtatgagccaccagcgcccagccctctacatgttttttaagtgcagtcagttgagtatggttttcagatggagaatctgattaatcatcttcaatggccttagcataagcattctatttaactgagctgattgtggctcataccctcaaatcaaatatcttaaagaatcatactgtttcagtcatcgtgtagcagttaattgtgagaagtgaaacttggaggacatccgtatgtaaaatcccccaccaaaggaaaccaatatgtttgggaaatcaaaatgaagcactagtaagaagccaactctggctgtagtggcaccactgtgatgagtgttagcataaaatgctgaaatactgcccccaattttattcttttatgttgtataatgaaacgttctatgcatgttatgtgcttgcaaagaaattattcagtagttcatatacacatcgttggattacataaggagctggacatggaactgctagaatggaatttccagagtccagccatcttaaccctactttgaagcctattcccagtgtgtttgctggttggatttagtttgctgccagtggtaaagagagtcagcttgagaatatattataacaaaatactgaattttatggcaacttttatttcaaatgaaggtgccatcctccttcctcagtagtcagggacaaatagcagctccattccagctcacagggaaccctatttaacttgaatcaagaacattctgtctaagcctgattcagctagagcacagggcggggtgagcacaacatcaccacaggtggcaacaaataatgatcttgttgggcgattcgggatataacccaacatcacccactgcgtcagtagcagggcattaaaacctagctgcattccgaaataccattaccactagaatgtgctgccttttacacagctatatttacacatttgataagacaaactttcccttttatagccaaatttgtgagtgcagctcagaagagaagaccagatggaagagcacaaagtttatccactctgttgcaggactgtaatcaacttcgtgagatagtacaaggagagagaaatatgactgggggagttttggagactctccatagtaatttatctacttctaacatgactattaacaaaaggacatcctgcatagaggactgattaatggtattcgtgtggctttcattagctaacataattgtcagtcaccggttgtcactgtgggatctgcacatatgtgatggtgggctttttacacatttatgcagggaagacttagctgggatcatagctgaaagctcattgttacttgataacattttgcaggtttcctgtgtaatttgttcaatgtgttgaggctcttcagattagctgcacaaacgtggagagtaaagatatgagctagctttgcattgtcagatccttcagagaccagaaataacaacttacctagtgtcacatgccatcagcatatctctgcagcagacacatgctaaaatttgtttcctgttcttaacaatacagtacaatattcgatatagctgcacgaataatatttgaaaaataagggcacagtagatgatcaaaacaagaggattgcttagatgaatgaggttgtttttttggaaatttattttgcccttaccacaagtattttttcacccattaaattattagaataaatgaacatgttgcattgagtttttgtggtggtcagaatatgaaatataagtatttttggattacaaccacatttttcttccctaaattgtgtgacatagcaaataggaaaagcagaacacaaaagtagactttggaagtatactttgcatacctgcatgttttgagttagagtcagaggagtatatttgtgatcttttaagatatttgaaaacacttaaagcctgtaaagagaagtattcaaaagaagctcctgtgaaatgtgtggcattgctctgaaagcatttgcatgtctgttttaaaaggctgttctttgcactggactgtctgcctctgttgatgcatttctaaggatgtggatatgtttatattaatgtcaagcaagtttgaaatagatttaggcacagactgcttaaaacttgctctgttattaaattgtttcagggtgtggaactaccgcctctctagaaacacatagagagcaaaattatgaactgcggtagaccaaatacaattaaatcatgcttaagattctcggaacacctcctgcatttgaagcattaacttagccttgagcttgccttcaactaatttttaattaacagaccttttatgcttagataagactttcaagacaagtaaaaatttttttgcacttttaaaattcgagtacttacttaacaagaattgaccctaagtttaggaactaccattggccttataaagttattcctgggtattagaagatacttggtgaataggttttatttcagtgaaataaatgatattgtttcatgtgagtaaaccatatgcctgagaaacacgtgtacattgaaaatgaattctattaacagatagctatttatataatctctgacaaaaagaaaatttactctgttgaaaattgactcattatggatagatgaaaaaaagtcatacaaaccacatgggctcaaatattagtttgcacttttataagaatctgtgaaatattcagggctattccagtagtcctggaagacaaaaagtttgaaaaaatatccataaagacaaaaaaaggtttaaaatttttgccctgtgtccttgatacttgaatttgagctctgccctgagtgagcgagaacctttgtatggtccttgtctagaaggtaccactgacggcagaacatccataagtcaaggatgcaattgtgcagctctgttggtagtacacagatgtgtttcttcacttacgctatggaggattttgagttatcaacttaagagagctgttttctgaaaagctggatatcctcatgtcatagaagttaccccagaaggacgcagcagggacattattacacctggacttctagggatgcaaagttagagtagctgtgagcttttccacatctgatgattttggaactatgtgcaagagagagaaattcaggctggtcactagaggtatccttgaaccgcaaacatcgagaaatgttcatacatcagggtcagcttaagaggggatattttagctaagaaggaccttggatctgaaggtctctgcctcattgcattgtagatcatctcgtaaggcaaggaatgtaccactctgcatatggaccccaaaaggaaaggagaagtgttgacctgcccaatgagtgattggtttccttccatcaaaagaccatagtggggttggggccctgaagtcacgattgtgaggatgaaccatgagcatttcagtgcaataccgcttgcagaatttaaatgatttaaatgaatgtaatgttattattaattaaatttaacttataaattattaactcaaatatttacaagaatttctttcatgaatgcaaattaaccaagagtttaaaaatacttaatgacatgaacataaagaagaaacctccttgagagcggagggtgagaagaacgtgacgattgaaaaactgccagttgggtactatgcttattacttggacgatgaaatcatctgtgcagcaaacccctgcaacactcaatttacccatataaaaatctgcacatgtaccccctgcacctaatataaaagttaaaaagaaaaaaaagaaaaaagaacagactaatgcacacacgcacacacagacacacatacacacgtgcgtatttaatgaagcctaggtcttttatctaatggcagaaagatcagatgagaaaggcagaaaatcagagacagaccaaggctcccggtttttttttttttcctctgtatgtgttagcatgtatatgtgtaaatgtatttctgtttgctaaaccatctaaagtttagttgaagacatcatgacatttcacccctaaatgcttaagcagatattgtctaagaacaaggagattcctttgcgtaaccacaacgcagtgctcctgcttgagaaatttaactttgatacaatatttttattcagatttccccagtagtcccaataatatcctatacagctctttttcccttggagcaggatccaatcagtagctccacattagattgacttgccatgtctctttaatctcctttaatctagatcacatttacagtcttcttttgttattgatgacattgattttaaagcctacttcagttgttttatagaatatctctcattttgaatttgtcgtattgtttcctcatgtttgaaatcaaaacccctaatacagaaataaataaactaatgaagacagaaggtgaagaggaaggagagacgagctagagagagaaaagaaggaaagagaggggcaaactgattttatgataaaatgtttatcaaaggggaagaaaacaaagtctccatagatttatgctcagactatattgataagcaaatatatggagtggtaaggggggaaacatggtccttaaagagaaggtatctgaagtatagttgacactcagacaatgtaggcattaggggtgccaatcccctgtgtggccaaaaatttaagtataacttttgactccccccaaacctaactactaatagcagcctactgttgactggaagtcttatcgatcacacaaacagttgattaataaatatttttaacttatatgtattatatatggtattcttataatacagtaacataaagaaaatattacaaggaagagaaaatatatttattcatcaggtgaaagtggatcattataaaggtcttcatccttgtcatcttcatgttgagtaggctgaggaggaagaggaagaggcgggcattggtcttgctgtctcaggggcagcagagacagaagaaaattcatgtataaggcattttgcttagaggcaagggaataaaccttggaagttctggtgtgttcccaagttaaatgtaaaatccagaggggtgaagaattcaaactagttatttcagtttataataaattaatgaggcaatgtatttttttaatatgtgtaaaccagtttttggtgtcatgtagcaccggcagatttgtttctttaaaacccttcaccaggccattggctcacacctgtaatcccaacattctgggaggccaaggcaggcagattgtttgagcccaggatgtggagaccagcttgtctaacatggcgaaactctgtctctatgaaaaatacaacagttagccaggggtggtatcatgcacttctggttccagttactcaggaggctgaggtgggaggatcacttgagcccaataggtggaggttggagtgagccatgatcatgccactgcactccagcctgtgcaaccgagcaagatcctgtctaaataaataaataaataaatcccttcaccaggctcacaaaattaaaaatgatcttaaggagttaacagaaatatgtagacactatttcagataacatgagaatttagtctgttttaaaaaacctgcaaaacagagattcatgaaccacattttaaaaagacttctatgaaagctcttcagaaaaaaatattttcaaggtgtcaaaaaaaaaaaaaaaaaaaagaaccagacaaaatattcaggtatcaagggctaagaacagctaaaacatgttttctaatttgccagtggccagtgtgtcaactacattaaatggctgcttctccacctcatctcccagccaccaaataaataataaggggaatatgtagctgtaggggtactgctaagaaatcacagcattcaaatgatttttttctgaaatttattggaaacttcgtatgttcattcttgacatttttaggatttacttggcaagggcagaatcgtagaaaaacaaatagagttccctgagtaggaaaggtctccatttcctgttcatggttaggtgatcctgattactgtccttggagtcttgagccccttacccggtgaataattaggtacggaatcagggaggtatagactcatttgcctgggtttgttttctgggagtttctgtttaacattcctgaactggagcagaagtagattttgtagctggcttttctgagactcaggaaacagaattgtggaattctcaggttctgtgacatttgttgattattaaagtgaaattatgtgtgagaggaaaatttattcatctatgcttttaagaaatgtctatgataaacagaattagacatactatatagaattgcataacacaccaccacatgtccgtattacccagtttccacagttatcagcttcttggtaattgtttttcacctttatgcctatccatttcccaccaccatattattttgaagcaaatctcggatattgtaacattttatctgcaagtatttcggtacatatttttaagcagtcttgcttaaaataagaatggtatgtaggtgtttaatgtattctccaagctaatgcataatttaagtactcacagtctctgttgagactatttagatgcactaaatccaatcaaagagagaatttgttgtgagtagtggtcatctggaatggtccattcattgtgtatgggatagaaactctgtaggtccagtcaaagagtgatagcatcagagaatttctgtcttgaagaaaggagccattgttaagattgatgggttttctgtgttctttggtcccctctgatgacaggatagtgaaatgagccctagctccgagtacccacaaactttgtaaccatggataaagtcagccacttacttatctctgaaattaaacttcccgattttaaaaatggatgtgatgcttcctgcgcctattcacagtactgtgatacactgtgatttgggatgtgaacacgctttaaaaataatggcccggttacatattctcctttttattttttatttttttttaatttctttttgaaacagaatctcactctgtcacccaggctgaagtgcagtggtgggatcatggctcactgcagcattgacctcctgggctcaggtggtccttccccctcagcctcccaggtagccgggactacaggcacatgccaccatgccgagctaatttttgtattttcatagagatggagtttcaccatgttgcccaaactggactccaacttctgaggtcaagtgatcctcctgcctcagcctccgtaagttgggggattacaggcgtgaaccaccgtgcccagcctacatacgctcctttaacacaggcttttggttctttgaaattaccaacattcaggattcttaatggcatcagagaatataaagcttgaaactatctagaatttttttaaggaataattttctaatcttggttctctgcttctgagtatattttatttgggcattttatttttctccaagatgagatccattttcgctcatccattttgaaattgtttttctctctgttaataaaacctttggaatggtgccttgatcaggctaactccagattaaatgtttctctttgaaagattgcctggtgatcagagttgtttttcattctcttttcttcttttagccttgcctccccgattgaaagagatgaaaagccaggaatcggctgcaggttccaaactagtccttcggtgtgaaaccagttctgaatactcctctctcagattcaagtggttcaagaatgggaatgaattgaatcgaaaaaacaaaccacaaaatatcaagatacaaaaaaagccagggtaagtataatgcataaaatagtagagactgcccccagcaataagataacatataaatgttatttagaccctaataagtgaatttactatcagaaacataatagataataagtgaaaagctgtttcattatataatgacaaaaaatcatgttatcacataggcaagaattcttgtggttcttacatcttattgatgaaggaaataaaggatggctggagaaagaactgtaggaagtaagaagagatggaagggaagaaggaagagagcattagtggtagatgctgtcatagtaatagatcctaaaattcaatttcttggccgggatggtggctcacaactgtaatcccagctctttgggaggccgaggagggcagatcacctgaagtcaggagttcgagaccagcctggccaacatggtgaaaccctgtctctactaaaaacacaaaaagtagctgggagtggtgggcgcctgtaatcccagctacttggaggctgagtcaggagaatcacttgaacccgggaggtggaggttgcagtaagccaagagcacgccaccgcactccagcctgggcaacagagcgagactccatctcaaaaaaaaaaaaaatgcaatttctttaaaataagacaaatgcatatgataatttagagtaccagtgccttacacagttaaaatcacaacttcattgtaaagctcagtgaatacttagatttatggaaagaattggaatgtaaccagttgaattcagactattttttaacaaggggttaatgatataattttatctaataagaatttttaactgacactgctgataaagcacatcatcattctagcagattttaaaattaggtaatcttaggtagcaagaattttacatgttcctaccctccccgaggaggtccatatttgacagggcttcatgtgattcctgtaacatcttggtggatgcattctgtatctactctaaaatgatactctgttatcatccctacactcttcattcttatttacttccttacttaagaatcatttcttctaatatcaaactacattttgaaatcagagaagagataagtggattagatttttgcttctaaagagtcctttaatcaacgtgacatgtataatagtggttccaaactcaaagatgatattttctgcactcacatctcacagggttccagtgaacccccaagtatggtaacagaagcaacagaacaatctcctatactttgattttataggacattaaccagaaagttgttacacattcatgagcaaagtgattacaatgagaattaaatttaatcttatcaaagattttgctctgatgactgtattttcttttctagtttctgtggttttattagctacatactttattaactacacgttgactctagttattgatcatgtcagatagatctatagctttggaagtataataaagtgtaaaagaaagggttgtatcactttctgcagcaggtggtacttcaaagatacaaaatataatactgtaaagagacatggcatttttatacctaatattactaattttttttacattattccaatatgtagcagttcagcagcacatggcaactatcttattttgcagattaggaaattgagggtcaaaaaagtgttctgctttgcctcaagtcatataactagtaagagactcagtgagagctgagtttatcattgttatacccattaaaaatgtaatatactgagaatgaaattaagtttcttcctgtagatcatagtggtaattaatggttcaagttagatttgaaataggtctgactctaagtctcatgtttaacagcatatgtgcatgaggggaggaggaaatacaatgaatgaattgaaaagataagtatgattcttacaaagaagtttaacaggacaaaaaaatactcctagattttggatggaatggattttggtgtttgcttttcatcagacaagttagtaaggaatgaagttatctctacatgcagggtaatgtctcatttatttctacgtggctgtcaaaggataccagtaatatttaagtgcccatgaaaggttttatgctaggactgtggagaaattaaagaggtatagggcattacaatctctgtgcccaggggcgggggtcataagattgtacagagattatctagttcagtcttatatgaaacatgggaaattttggaagttatgtattgaaacactgttagagcaggggaggaggaagggagggaggagaatttcatctagaagaaagcatctcacattgcagatattcaatctgatgctacctggagagaagcaaatgaagttcggtagataagatgagaaaatgaatttttttaaaaaagtgaactgactagaatgaataggctttagaaaaggtacatgtatacttaaagaggtaatttgttacctggcttcaatgacatataaaagtatcattagtattcagaaaagcattttcatattggcttcataggtccagacagctaagagcactgtctacatattaataaaatcccattataccagaaagggcaatagttagaaattacttcttttaaacaatagtcttgctggaaagaattaaatggggaaaaatgtattgaagtgatgcaaccataaatcactcgcagcaaagcagttaacatatttgatctaaaaataagacatactttgtatagagtggacagctacttgagaagcgatcatcttatcagtttttagaattgggtattttgtcatttctaaaattgtgtctttttataaagaagagcattgtcagcttttttaagattaaaggttccaactgaatctcaatttaattaacatttgcaaggtgttctattatttcaatttatccagtaaatataagtagaaggaatataattattgttatacccatttaaaacattaatatcctgaaaatgaaggaagctgagtttcttcctgtagatcatagtggtaatgaattgttaaacttagatttgaaataggtctgactctaagtcttgtgttttttcaacagacatttgtgattatgctacataaagttagaagtcagaacatagggctctggcatgcttaggataatgtctttaattaaaagattcttatttttcagatgcatttatatattactattaatgatttttaattactaagatattcagactattagtgttttgcagttgttagttggttacttgacttaaactttttcttaggctatgatcaaccaagcagaggtgaagtttagtttgaggtgtaagatttttctgggattctctttaattaaatactttgactctttcccaatccttagtcttggcttctttttcacacttcttataatcagattatgcatagcagccaacatatccttttaatctcttggtgtttagtggcacaatttcacagcaatatgcaatttctattattttgtaaaatcttacccttgttttgcccacggtcctactaaaaactacattcctacgtgttctttgtatgatttttgaattcccattgagcctttgtttatttggctaacccatgtgtggggccaatgaaaagaaatggaaactaccctcatgttatatgtctgcttatgtctttgttcttgttttctttgattggtggatgattttgatcaagaaaactggttaaaaagcttggcgtgtgacagattcatatgtaaggactggcagattgacctcatttaaatacctgttctatcttagctttattaaagactggcttcctattatttgtatgtttcacacacttttggacaccattaattttgcctcagctcttacatattttaattttgtttaaaattggctgtcattggttacattggacaaatattacaattatttcctctatttttactggttgctttttttgactttataatggaaaaagtttatgtgcatttcttttctcatattagctgagcaactctggcagatcacttgaactttatatataatgaaatctcaatgttcttatgtagaaaatgagaatcctcagtggcattccatatggtttatgtgaggcacttggtacagtgactggttctgttgcttaagaagcctctcttttagccaagcacagtggtgtgtacctgcagtccctgctactgaggatctcttgagcgcaggagttcaagaccagcctgggaaacatagcaagaccccgtctctatacttaaaaaaaaatcataatttcctctttcacttctttgtccttttcacgatgatcagttttacactatctgaagcagtgttggacacacacacacacacacacacacacacaaacactgtctatataattccttaggggtcagggaaccaaaactgtataaacagaagagttcttccctatatgtgtttaagttgccttagcctgtaactatggtagaataatcgagttaaaataaaactaaactaaataatagctaatggaaccttgaattcaccttgtaagtgagcacacagtaaaaaacacagtgtgctttctgatattaaaaaaatgaaaaggaaattaatattcagaactttttatcttcaaatcacttcacattaatttatttttacactgtactgttttttcttattctaaaagtaatgcatgcttattatgaaaatccaaatatttcaggaatatagaatgtaattactataataatagctaacacttattgggaagttactatattgaaaaaattattttaaacactttacacgaattaactcatttaatatttttagaaaataaaaatccattgaaacaccaaccttcctccagatccctagaaaactcatcaattaaagagcaaaaagttaaatttatgactataagggaatcaagtagtctttccaagctaatttccttcttatagacagagtatggtatcttacagaaaagaaaaaaagaagactgttgtatccatacttatcaaagccccaaatctttttgcaatatataattttcaaggaagatttggctcattctacactcttactacattctgtccttactctaggacacaaggctggatgaatcccatagttaaatgtatcattagaattcagagggatgtttatgctccttgaggtcagtggttttccaatgatgtctctgtagagtcctaaatttctattgaattgcaaaaaggattaccagtcactctgacctggaacactttctgtgtgatatttttgaatatgaggttctgatttaagctttcattttaaaacaggattttgttgtaaaaaatagttgaaaccactgatctaatttaatctttctctgcacagagatattcttgtaggaatgtgcttggcaggtggctatccagacttgaatctttccaaagagaaaacctaactctttcacaagacaccctatacatttttgaatgctcagaaaagtgcttctatgtaatatcattcaaaacatgtttcctttttcctgtaagacttagttttcctgtaagacttagcaatcccaaataatttccttttccatatgcatcctggaaatatatttaaatagctactcatatttcattcatagttgtctgccagtgggacctctgtttctttaacataatcctctctagtgataagatttctaggccctattcaattctgatcaccctcttctaaagtcctttaattatgtttttttatcatcaaatatcattccaaagtatatccaaagtataattcagcattctagatatgatctagccgatgaggaatgtattggggcttttatccaagttgattgatgctctgctttaatattaatttggctaaagagtacataaggttttttttgttattctttcttcttaaaaatagttttaaaaatgggttaataataagcatgtggctaattagaaatccttatttctgcatatattgtagtcaagggatatctcctcttgtatttatgtcaccagttttcgtacgtgaatgtacttgtgatgcttatctcgatcaaattgaatcttagtcttggcccattgatgttctgtcttaggattcccaagggtgttctccatagaaaagattccatggccacatgtcatggctgccttagaaattcacagtacagatttgcaaaaattcactgagatgcattgttgtaaagagacctatttaactttttttaatgcaacatttattttagcatagaaccattttttttaaatctctctttcttttaaagcctaacatttgattgcattactaggaatagtattccaggaaacagtgccaaggcctattaggagaagtttgattttaagacttatccctttaagattatgttaactgtaaatatgattaccatgttttcttatagttccatctagttcaatagttaaaatgttaattgcattgggtcaagaaaggggtctttacatacaaacacgattgttcctagatttgtataaataggaaagaaaggttgttcttgagggtgttgtaataatcttggagttgtaaattcttgggatgttgttgtaatcttatctcagaatttggggacttaagaaaagctacagttttcttactttagaaatttactccttctgtggcattgaaaatcaagatactatgccccaccctgatattgttcataatttatctattattgctagtggtttcatggttatacatgaaaattcttccagcaaaccatgctaaatgttgggctggaaaatcttacagtgcttatccatttttttcctcactatttttcaaaggtacctgtcatgaaggaaacttgtcatatatgatcaaagtagatatatagctgataatccatttaaaaaatcatacggtatttgaacgctccaaaattcagccccaaaattaatacagcctgcattgggtgatattctaatattgttttatttcgataattttaaaagttgtcatattttattgttaagacatatctatttgcaaagatacttgtcatcaaaaggcccattttggcttatagggatatacttcagggaagctttcctatgaataatgtctctggttgatgtgtgaatattctttaaatggcccttggtggtctccccattcctagatagataaggctgttaaattacatccactttttgtcaactttgttccgtggaccattattttcagaaaacattaacagatatgccttgtgaatgaaaaggattccatggtcaaaggagtttgagagaaaataaataatatatcccttttcggggagtcagagtacaacagcatattcaagatgctgagaaatcctgtgagattaaagataatgaaaagcctgtctttatttcacctaatattttccaaatttatttgaatgtggaacacattgctttgttacctcatgtttacctggttgacatcsaktcccgactagcgcagttaacttttctttttctttttctttgaccaagtctcactctgtcacccaggctggagtgcaatggtgtggtctcggctcactgcaacctctgcctcccggattcaaatgattctcccgccttagtctcctgagcagctgagactacaggctcatgccacacacctggctaatttttgtatttttagtagcgacagggtttcactattttggccaggcttgtcttgaactcctgacctcgtgatctgtcttcctcggcctcccaaagtgctgggattacaggcgtgagccactgctcccagccgtgaagttaacttttcaacccctatgttggtttgaccaccactgcccctggtctggaccacctctgatggtctttgccctctcattatggcatttttctttcctcccaaccagccttagaaatattaggttctgctgagtacttaagcaaacatccagatattttattcattcattcacacatttattcaataatgtctgaagagaaagcatagcctgatgtatgctccacgagactagcaagaagttgacattatagctacactctccaaagtatatgtcctaggtcaagagatgagacatactgaaggaactctcatgagaggcgtactcagggctgtcagaatttagacacgtgagagcagctccagctacatgaccaggaggggcttggtgaagcagttggcacctgacatggccctggaaggtcagctgagattttgatgcataggaatgcaggacccccattgtaggaagaaaaaatgacacagacaaaagcacagaggtggaagatcagggggtctacatgtggaactttgggtggttcaatcggatagactggaggatactagtaggaattatatttggaacaattgatttttctcagttaacattaatgtgtgacaagaagaccagaaaattcaccagaaaactagcaaagtataacgtgggagatttgcaaccagaaggattactgttgtttcttcctcctttgttttctcccttgtcgttatccccttaagagcccaataaatcacagttaccaggctagagcatagaaggattgctattattttttggagataggggtctcaccctgctgcccagactggagtgcagtgactcttcaccagcatgatcatggcacactacagccttgaattcttgggcccaagtgattctctcatgtcagcctcccaagtagctgggattccaggggcatgccaccacaccaggctttagaataattctttagaaagaattcagtaaactctgagccaatccctgctgttctgagttcttatatcttggagactgcttaaattataggttatgtgcaacagtaaaacacagacacagcaaatcacaatgctgcccatgttaaaaaaaaaaagtgaatgttgatgtaatattcagagttttataaaactatgtgataatgttgcccaaatatttattccagtattaagaacctttcatgtggtactatgctcccagcaatgagaatcttaaggaaagaaaaattcccttccttttggaattgataaatcctcttaattcaaaattaacattattcttgatgttactctactgagaagaagagtgcacagtatttttaaaatctattctaaccttcagtaagtgtccttaacagacttgtaggaaatgattttatacatttttctcttcctaaaccctagtggctgatggcatttggatatagaaaagtaagaaaatttaccaattgggtttaaaaatctaaagtataacacagttattggtgatggtaagggagtaaaaagaaaaactacagaagaattcctttaaactactgatttaggtgataaaattgagatgaaatccatggtacaacttaaatgtgatgcatcttacttttactctaggtaaaatcatgaggtcagatcaatgtaacggaagttgtattttaacatatgtataaggtggggagaggcagtttgagaactctgaaagcatagaaaagtatgtatttatatttgttggatttctgtgatatatactgacaccactttggtcctgatcttataggaagtcagaacttcgcattaacaaagcatcactggctgattctggagagtatatgtgcaaagtgatcagcaaattaggaaatgacagtgcctctgccaatatcaccatcgtggaatcaaacggtaagagatacctacggtattctgttcctcaatctgtaacaagagtaatcaaaacatgtggtaagactcataatagactggtgtgttaaatctcattgtgaacaaattaaaaacagagaaagaaaaccagatgtttcaaggatcttgtatgtctttcataaatttctgtactctatgagattatatagacctgaaatatacatatattttttacaaaaggattttaataaggccatgaatggcagagataggttgggttgctaaaatataggggctatactatttttttaagttggtcagtgagggcagtcaagtctttggctctctgaacaacagaatacagtcatatatatatacaggatatatatacacaatatgtatatatgcacacagaatatatgcatattatgtattatatatgcgttatatatgtatatatgtttacgtatatataacatatgtattatatatgtattatgtatgtattatatatgtattatatatattacatatataatatgcatacatatataatatgcatatattctgtgtgtgtgcagaatacagtcctgactcaattctggcaattttattcccattacatctggcattaggtagtagaaagttaaaccattaattttttttaggcctattaattttgaaattaggaccgtcttagaggcaataaatttcctactaggaagaggcttcatcttcagctttgttcagaatagtaccaggcaatacttgttaaacaaatgaatgacttagaggtaagaaatacaatccacctctgacaacttctgtgttattccaggaaattaaaagaaccaccccgatggctttgtgttttgtaatagcctgatactccatgatttgatggaatcatctataggagctgatgatgatgatgacctagcaatgcttctttaaaccttttagaataatcaaatgctattttaaaacctttagtgcttatttatttatttattgaattatggcacttaactattgcctttacaaaatttgtcatctgttatataaccaagcctaattgcatcttcttggtaggagatgagaaagattctgcatttcaaaggcaagcgctcttaaagtgataaggtaaaaatgccaggtcagcacaggcagagttaaagtaattttaagggttaattctatgggaggctgatgtagtttttgtcacttgattcttctgtaacatactaagaaagtgagaagggagataaaaatcagaaacagggctgggaaaattcaggttaatgcctcatcctctctggacttctcaaggatctgctccatcacagagtaatcaaagtttatcactttcattttaaatgtctccctccatagagagtaaaggagagcagggaaaaggagtttccattaccattaggagtcctgtttattacagtttaaaatgtaaaagccatttaaaatttatatgagtaaatatagcatcactttattttttaaccagggcaggttaagcaataatagtttgctagtattactttaccccacgtagaattctataggatgctacctgaaacacacattaaaaaattaattttaatgggctgttttttactttctactataaccattgtttgaagctcgttctccttagtttgtcactggcttggttcagtgtgtttcctcatagttaatggtattcaattgtgatttttgacacttggatttgattcgtgtagctataccacaaagtcccaggaaaataaaattaaagctagtgtcatagtctcactgagtgtctacagaagtatcatattgattattccatggtttctgatttacaggattaagcaatgaattatttactactatattattcctggcaaaaacccatagaattccttttttattaatttgggggtactgaaagtttgataatatggctttttacatttcttacataggaaaaacagctaattcattttttccacattaattcactgaagtcttggtctagtgatcaaatttgaatatgtagtgttgaccaattatagggtagagagatgaaactcgaggtgtttttgataatgagtcttttttacctggcaagaataaagagaagttcatggaatattttaagtaaatccttcttaaacaaccaacaaaaattctttcagaaataggttcctatggacttatgtaattaaagcctctgaagaatgagaatgaagagtctcaattgcaatgcaagttggccttctttttattctcttcttggaatgttaggaatagatcatccttatccaaccccttcattgtattaaaaaagaataaaagacagcatagaaaacagacttattcaggatcacagagatatttaacagcaaaaggagatatgaacccaggttttttttgttttttttttttttgtttttttttttttttgcttcattcctaccacagtgcagttccatctgtatctgaaatgttttttgtgtgtgttttcttttttgttttttgagacagggtttcactctgtcacccaggctagggtgcagaggtgtgatcttggctcactgcaacctctgactcctggactgaagggatcctcccacctcagccccctgagtagccaggtgcatgccattacgcctggctaattaaaaaaaaaaaattttgtttgagatggagtgttgctatgttgcccactctggaactcctaggttcaactatgttgcccactgtggaactcctgagttcaagaagtctacccaccttgaactcccaaagtgctgggattacaggtgtgagccgctgcgcccagccttactctgtatctgactatatgcttgcaaatgtttaagtgagattcttttgcttataaagaacagaagctgaaggaatggtatgaggcctaaggagtgagggattctatggcgaagaactagaacttcattataactcagcctcgaggagatggaattgtatgctgagcatctctgcgaatttaagcaatgcgagtttgtggcttttctctctggtgtttctacctttaatatgcttctgatagttttaacaaaagttacctaccttctcacctctcctactttcagactccgcctctttataattccaaactttgacctgtttcttgcccccacgtggccatattcttcatggcaatttcaggcattctttcagctttaacctctactgtatgattgtttccttggttccccagtgaaattccgcagaccaagaatcctattagcaaagttgattgttgcatattcattaaaagacctagagaacttacaaattatctgctgtctggtcatacgtccactgctgcctcaactagggagggtggagccggaaacatagctgcccggaagctcctctcttcaaagtctgggggtggagcatgcagctcacctgggcctgtggcttggcaggcaccatgattgacaaggccagtttcctgtacattagaggagataccctttttgctctgcaccttagagtcctagttatagtgcatccagaaggaaaatatgtaatcatcttgatcccttatcctcttccactgctatctaagaatttgctatattctgttcaatgcttggttgtcaaagaagcctcagttgggttctgagctctccggggcttagatgcactgcctttgtattgtctcattcctgtctccctaggaatcagggcagacgttgcacagaaacactttttctgagagaaaaagggcactttctactgggtttataaattgccgcaccactgaaccatgtcttcctaaatagatatttaccgttgacttgggctgatagagagtagaattctcaagaatttccttccctccctccttccttccttccttccttccttccttccttcctttccctccctccctccctctgtctgtctctctctctctttccttttttttttttttttttaaatggtgtttcgctgtgtcacctaggctggagtgcagtggcaggatctcggccactgcactggattcaagcaattctcctcctggattcaagcaattctcctgcctcagcctcttgagtagctgggattctagacaccccccaccacaccccagctaatttttgtatttcttgtagacaaggtttcgccatgttggccatgctggtctctaactcctgacctcaaatgatctgcccactttgggctcccaaagtgcttggattacaggtgtgaaccatcacacccggtcaagaatttattgtttcattgtggattctagaaaaaaaaaaagttgttaaaataagaacatgctgtcaaactattacattatgtagaactccccttgagattttaatttatattttctatgaactatcagtcactttattaatttcattttttcaccttttctatgtatttccaagaagctcatggctatagtttcgagaatttctatacaggtttccttgatgaatgatccttgtaggttgctgcaatctaattatcctaattttttcctatgcagaggattccttgtgattcacttaaattctcacacagttactttttgtatgttccaacatgtttagaacatattttgatacaagattctaagagagatggggaggttgggggagacattcgttggaagctgtttactttctccccagatgaccttgctgtttggcatgatgtttaatctcattaaggaagctatagtaattattaaaataaaattagatcataaaagtcttctgcaatgaaactcattgtttagatctatctggattagtgactaaatataaacgaaatgattaaaaaattaggaaattccccttgaaacagtatatgcttgggtgtaacagtggccatacttatactgttttcaagcacttagaaaataatacagtcaagcattttgccaacctacattttagaaatgtaggtgttttctgtcttttccaatgcctttcaacccctactttattcagaattagagaaagtaatttatcctgtagtagacatatatcaacctatgcaatctgctaattacttctgggacaatgtaaagcttacaaagaccagttgggttttcatataacaaaggatctcataggcagtaattatgtgataacttatgagtgaattcctttcatgaattcgtatatgacagcagaaaaggccacatacatcatgtttacacaccctacacactatatgttcatttgtatttgtggtttatttggctcagtctgtatataggaaaccttgacttagcaattaattcttagctaacaagctttgtgaaaactcctgggctttagagtagggaagagaataatagactttactggtttccaaattaattaagtaatgctttcttttaaaagattaatataggaaaatatacaactaatcaatcatatcttctcctaagttttcttttttaatcagaagaaaaattatttgaatgagattcaagttcccacaggagcaattgggcttgtagcaaaaaaatagctgtttcatttgagatgagcagaaaaatattatttttataaaatttaattaaattatcaattgcagcttttaaaaatagactcatactggtaataggcttcgccttaccccctttcccaaattgataatgatgttagaaatttcacaatattgggaaacaacctgcagttatgttgaaaagcatgtaaaatatgttttataatttgtataacagtctacatgtatattgtattatgtaggatgcccaggaaggcaaatacatgagaacaatatgaaagcaatagggtagatttgtcttttcaatgtatggtatccatcctgtctacactgtttattaatttcaaaatttctcagttgccttagagtaagcattcattatgaacaggaagaattcaggtacttaaagatgttccttaagttatctttataactgctaataaataaatatgtccacttttaaatcttttaaagaaatcacttgatcaaaatttttgtatgtacagcagtgacatataagtttggtaaaaaagtcacataagtgaatgttggaatacacacagacacattttatgtatgtttgtatatactgtatacaatgtgcatatgtgtattttgctacataattatatttagtgtattatgatcatgatgaaattgcaaacatgttacattcataataattagaaaaattcctttctagaagatatctttgagaccatgcaactttttcctgagaccagaccccgtttattaagaaagaattcaaacattacaaatatactaatgttcattatgtttacttgcctgttcagcataagttgctcagctgtgttcagtttctgataattctaaaacctcattaatttgcactaatgaaggggctgtcctttataaattaacaaatgtaatatgccaaattactatgggaaaatatgttgcttaaataaacatcataaagattgcaggatttaatgcttttttaaaagtctgtaagtgtaatataaaattactttcaatttacttttaacaaaaggctgttttccaaatctataaattctacccatagcacacataaaaatgcttgctgagtggttttaattaaaaagattaactttcttactagcaagattctttttacaatgaagactcctttggtgtagaagtataggttaacttttgagcttgtatttcctccagggttaattcagaaagtttgtatttgaaaccataatcattaaagatattttaaggtctccaagataaatacctgattttaggaagaggagttattttaagttgtctctgtgtagatgcctctttgtagtaacctcctgttctggtatttttaggtaacattcaattaaaaaatgaaacattatggttaaccttccctctaatctgaggtattttttgctggagatagaaaagttctgatttttttttcttcttggaaggtcacagtggacagctactttgtttgtcaaaaataaatttgaaaagagtcttgatatccgaattgggattgggacttctgcccagctctagttgagcaccttgggtttacgacttcatctggttgtaatgtcattgatgaatcctgaaggacaagagaaggaagcatctctcttagtgtaggtcctttgtttggaaacatggcccttctagatatttctagagaaggacacacactttgtatctctaatatagtttctttgagattacattttctcaaagaagaacaatttcattttctgcagcccaaatcaagaaagcttgttggtgctgcttcagaaacagatatcttcatattaccaattcggaatatcctctttctcgcctgatgcttgagaaaatcctgagaaaatgatgtaccctcacatactaattcctttcagtgagccccatttttagtggatgtaagagccaacgtaggcaactttgatgtattgaaaccaagcttactccttgcatagtttgccctcctaatctgtgattagagaggatcatccacacttaatttgcagcagaaagacacatttggtcttactaaaggtttattgctaatcacttgttcttaaacattgctgctgagtctcacatgactttgtttccctttcaattccacaaaatcttttgtccctagagaagcttcagagtttgaagaaatattggcgcttaaattgattctgcttacctgctagactagtccaatcttggaaaccctaaatggccatatctgtatttaaagatgattatattagtaataaagttttctactccattattaacagaatattaatttaaacataaaattatatatgacctgcttaggattctcggttagatctcataatttttgtacagtagatagtatcgcagtagattcagcttatcttttgtcctggttagaaaatgtgaactaccattaagtcatttggcaagacttatgacacagtgaaacttgaatgatatacatcattgcatctctacatctttccaggcttcataaaactgtacctttccaaaagtgttagattctgccaaactgaagcccttttcagaactgaatatggaattagacagtgtaactacccattccatcataaaggcagtaagaaaacaagttgaaagtttgaataagactgtcacaatcctcatgaaaatgatgtatccagaagtatacaggttggattcatccttcatttctttgggtgggagctgcatacttactgcctgggtagctaatgtctatcatatgataagcacctgtcttcattctcactggcaattttaaatagaattcaatgccagaacttgatgtttttcaccaatcctaattagaaacatggcttacttttatttttgaacaaaaatgtacttgttcaaagatctgtaacttaaaaattcttactacagcttggcaatccgatagctttgactttcttagttcccctatttcgacttttcttcctgagaagcctactgcctctttgacataaattcttcctcactgacccaagtggaggcagtgaatgcttcctaattattttagcacagctgattttatgctctttgcataagaaaggagaactatcaatttggactgtctttctgcatttctcactctctgtatggttaaagcctggacttttctcactcccttgcaatacttccttcctttacacttaacttttagttccaaggcaggctgtggtacctgctcccggcctcctgtttatatatcataatgtcctatcacctttttttttcagagatcatcactggtatgccagcctcaactgaaggagcatatgtgtcttcaggtaaggaaaataagcctggcaaattttactaaccagaatgacaaccataactgctggctgctccttctactaatcagaaccccttctgcatccagacctctcagctgctcttgttttctgcttcaatatttttctcaaccttgttctgtctttttggattttacttaagggaggatggttcttgctgtgtcttcaaacttaggcctgagaaacatacatgagtgaaagaaatctatatctaggtgcaacttaatgacattaagcaagtaaaggagatatatctgagttacaagctcagtttttatgtctttccaggtgattctcttagctgccttctactctttcacccctcagagtgtattcctgggtaatttgtcaacatctgatccgtgacctttgggtttctaataatcagttgtggatcgctaaacttaacaaaacaaaacagaacagaacagaacaaaacaaaacaaaaagacttacagcctttaaaaatgctgttgtctttgttttggttggtttctcacttgcctgtagtatttgctgatagcacttatagtctgagcagatattagcaacttagaacccaactctagcaatgcatatataaccataattcattgatttcttcacaagctatgaatttaatctatcctctatgtatttcattttttaaactttttcttattctttgtaatgctataattaatagagccttagaacatttaaaaattaatctttatttggaagaaaatttttgaagacccaagattggaaattcatctcagaggtacaatggtaatttggttttgcatggtgccttttcttttacaaaaattcttaaatttcatttgataatcacaataaacttgtgaaacaagacatcatttttcctcattttacagatgagaaaactgaagtattagaaatgttaagtcatatacctcaggaagtagaagagaaggtatttcaagttcgatattctttttattactccacatttaatattttagcttcattgagtttttcattatggctggtaccttgttgaaactatagaatgacctataatcaacatgtctttttccatcttacctccatcatttcctcttcccttcaaagccattttttaaaaccataaaagctaaacatctctgtatcctagactactttagctatatttaggacatattcatatgtcattactaagatataagtgtatgtgtgttgcggaatggtatgatcctggagtctaagaggttgttactcttctgaggaaaggaaggaaggaaaaaagaggaaaagagagagaaaaaaagaaaaaaaatcacatattctaaatttcttcacctttcatttacacgtttctgtaatatagggacttcgttatctgactccagtaaatgccattaggaaaaaaagagcttttacatttatatggaacttatcttgggaaattgactataactattatttcttaatatgtgacttgaatcttgataactttctggctgttgactttcaatccttctttgatactaagacttctttatttcttactaatgaaaacccatccgttccatgcttttttcggcatgagtcatatttttcattctctctgtacttaatgactgttttttcttcttttatctttgctacctgagaaaatcttgctactagatatccccaactattgtatgatttatttaattagcatggtttgtttgatcctaatgtaattattctattgctctagcagactttgcatggacttttcagcactttctggtccggatgtttatgcagatccaagttgcctggaaatactctcaatcttgtttgtttatttatttggcatgcatgaaaattggctttcactctcttggaatccaggggctattctctttggtttcatgttttctcaaaatcaagaccacatctgaaagaaggaattttctttctcacctgtggtgtgtatctcctcagagtagtctctcttggaagttcagataatgcttggtgtgtgggatattcttacagatggattgactccattttcatcccttttaaaagtctttgggtctagactatggtaatattcctttgtggtctttgagtattgcattctgacttataaatgcttcagcttctctgttgcacggtgttctactactcttttactaggcgatacccaagcctggcaaatttctaatttatgagtccaagcagcatgactcaataaagcctcattccacttttatgttttatagagtctcccattagaatatcagtatccacagaaggagcaaatacttcttcatgtaagtatacttaaatattctattcactggtttttaacccaaggcactatctgctttggaaggtcatgttcacgtctatcttctgcccctattaagggtcagagtattgagtttggcaataggtggtatttgctgtttggagtagaaatggcctcctaatatgcttaaggacaactagacatcctgtcctcccaatatacataagaatattaaaatacaccacaaatgtatcagttttagggtaatctggtggctttgaatattgaaaaataattgcacaagttctgaggcctaattcctggcaagcagtagagcacattgtgtgtcttttcagcttctctggatgccttcagcaactgcctgaggcatgatacccagctgtttggagcttccgttccaaaacttcttcattctcatataaagttagctgtgatggagtaagaaaactatatatagatgcccttaattcaaatttgatagcaagtaactgattatgaaaatgtttgaaagcaagcccctaggcaagatctcagattagttttcgtctatttaatgtgaaatgggctttgtgcttgtggacttctataactgttagattgattggggttttgtgctatgtcgggggaacttaaaatattagcaaggactagtataaagagtttttgatacttataaattgagaatatcatcgtattaaattttgatactcaacaggggagtttatcaaaccttgaaaattaaacttataactacagtctttctcttccttatgttagctccttatttaaagcatttctcaatttgataagctcttcaataaatagatgttcctagttattctatttcgatctggggagtgtgttgaaggaacaatttccttttgctatcagcagggtaggaaaactcatgaaaagaaagtctgtccttttggcaatttaagttgttttgtcaatctgtttaaataaatcctgtttgatgttacagcctttccctccaggttggtgatactagaactgtaactatatggtataaaattatcttttattgtgtgaagtatggtgttttggctatattttaactacataaagcgtcatttaactggattgatggcaatagcctggtgagatcaaacaggaaatgaaatgctagaaagggccaaattagtttcctatgtgttccaagggctctcatcatatcctccaaaatgataatttctgccggggaatttgtgctatttgttttttaattctacttataaaaagattagtataattatatggattttatgtagctagcatccaggaatcacattgagctttttttttttaagtgtttattctgcagaagcaaatactaggtttttcttttttggcattttgtctggaaataatttctctcctgtgtgattcattgaataaagttattgaaactcttgtaattggaacccttcatgctatcatcaatgggaccatagatactatccttaagcatatctgagcagtttgagaatgtaaaaaaatacttttggttttcccaagctttggggaactgaaataaatctctcagtttatgtttctattcattgcattatcactgagagagaaataattatgaaatctgactccattccctaattctcagtagaattagtttttgatatttggcaatggtttaaaactaagaaaggaagctttgtgtaccatgatattaaaatatttcaatgtgccattttcacacatcagtcacccggggtcatggtaagttctcagtaaatatggttgaattgattcatgaacacatttttttgtggaacttaattttattaggagaatataaacaatgaatataataaactagtaacacgatatattagaaggtgctacgtagtccaaaaatgagaaacagtagaggaggggaggggataaggagagttgaaacttgtgatttttattaggttgatcaaggtaagtctcattaaattgttgatatttggacaaaaagtggaaagaagtgaagggttaactttgcaaacatctagggaaactggctgggcatggtcgctcatgcctataatcctagcattttgggaggccaaggcgggaagattgcttgagcccaagagtttgaggccagtctgggtaacattagtcagacctcagctctacagaaaattgaaaacttagctggacttggtggcatgcacttgtagtcccaccttcttgggaggctgaggtgggaggatcacttgaactcaggaggttgaggctgcagtgagctgtgattgtgccactgcactccagcctgggtgacagagggagactctgtttcaagaaaaacaatcaaacaaacaaacaaaaaaacatctggggaaactgtatttaggcaaagaacaggctgtacaaaggcccttagacaaaagcatggctcatgtgccgtgtaggggaccataaggagccctgtggggttggagtagaaggaacaaagggatgaaatatagaagatgagggccacagaccctggggtctgagcatgtagtgccttgtaggccattgtcaggacattggtatttaatggaatcactctggctcctgtgtgaagaatggctcactgggaggaagggtagaatccaggatcccagttaggtggcttttgctgagagcatagtggcctggcccaggctggtagcagtagaggtggcaaaaaagtcagtctgtaatagtttgaaagtcaagccagcaagattccctaaccaattcattgtgaggtgttagagaaagagaaaagccataggtaaaaccaaggctgcttttgtttttggtttttaacttttggtgttccatttgattttcttctttggctttttcattatacttcttcatattaactattgttttacttgtttttttataattacaatatgcatgttttactaatcctagtgtgttttttaaaattttagattcagcgggtacattggcaggtttattacattttttaatctcatgaaaatatgctcttcagtttgaaaatataaaccagtcgtggcaggaaccaggtccagtcttagttacaataatgaaaatagcatgaagcacacagtccatttcaaggcagccacacgcaggacttgcattgcagggaacgactgtgaggtacaaatatctccatttagtaaaggctgaaggtgaaccttgaagagtcagcaataacaataagccaaactcaaaaatgccaaatatataaaaaagtcaaaggcctcagaaaagtttgcctggtcaaaaataatcagcttcaaagaatagatttcttttcactttattttagccagcaaggagatgctagtaaatccctgtatttgaaaagcgaactctgcttttctaatgtgattgtgcctgtaccggctacattctttgaactaatgacattggtgttttctaaagtaaatgttgaaaagcctctctgaagtagtatggattcagcaaacattttatgtattaaacagttctctgcgatttgggggtcagtgtaagacaggggaggctttcagagcaaacagatataggcagaggagatggatctgacttcacagcccccaaagttcccttttttcctctttaactcatgttggattagaagaaaaaaaaaaaaaaaaaaagagcaggcatggtggctcatgcctgtaatcctagcactttgagaggccaaagagggaggatagcttgacaccaggagttcgagactagtctgggcaacacattgagacctcatctctataaaaaaataaagaaattagccaggcttggtggcagccctgaagtctcagctacttgggaggctgaggtgggaggatcacctgagcccgggagtttgaggctgtcctaagttatggttgaaccactgcactccagcctgggcaacagagcgagaacttgtctctcttaaaataaaaacaaacaaaaaaagaaagaaagaaaaagaaaaaaacaaaaagaagaaaatagaagtcactcacctacccttctacctacttaatatattataagcatttttctcatgtttttaaatagtaatcagaaatatattttataggtcactgtaacaataaagaaatcattcttgactggaggtttttaagggattttttcatttacaaacacattatcggttttgccccctttctgtttatttttcctaccacttgtaaatattagtgaaatatcaaagttcttagtccttccctttgtaagacaatttttactactcaatttttggaaattggaaacttccattgttcattcactagtttagagttgttaattatatttttaagttctttatactaatctaataaagatcaaaattataattttctttattttcttttgttttttgtaaatgaggcatctgtgactaaaaacttataaataattgcctaaatgagttttctattacatgtaagtgacaagttttaggagaagaacttgaaccttacaaaacagtcaataggactatcttgctgctccttttatagaatcagcagaagtaaagtgattgtttggaacaagccttaatgacttcttctggagatgccagctgctggtagccccattttgcagacaattctgttgaataccataaaaaattgttataccaaccactttgctgaattaagcaccatccattccaatttaatacataaatgaggaaaacaaaacggaaaatctaacaaatagtaataggaaagaaaatcaagataaatcccgggaaaacagttgaagtggtaatatctgtttcaaatatgaataacagcaagcatttattgaaggcttactgtgtgccaggtgttgtgctagatgttttacatggatgatgactcatggttatcatgaaaacttattacactgtacgttgaaactgatacatgttgtccaaagtcacacagcagcatttaaccccagataatgcagtggactgctatgtcacataacgttttgctgcctcaaagaaaaagcccttactattgaaagaaatgggattctgtgagtggattgaaaggtagcctttggcaccaagtttattgggagtatatgtggtggattcaagtaaatgacttgtctggggccagttgtacccaagtgatcttcatgttacacgtcaaagcatggcaggtgaatgaaatgggaagagcacaaatgctgagtggactcatgctcttaagtctaaatactaatgctgaggacaatcgcggtggctcatgcttgtaatcctagcactttgggaggccatagtgggaggattgcttgagcaaattgatcatttgagcccaggagattgaggtttcagtaagtcatgatctcactactacactccagcctgggcaacagagaccctgtctcaaaaataataaaagaaataaattctggtgctgctaattaccgtataattttaaacaaattatgtgacttccctgagactcagtttcatctctcctctcctctcctcttcttttctgttctgttcttttcttttcttcttttgacagggtttctctctgtcacccaggctggagtgcagtagtgcactcatggctcactgcagccttgacctcctgggctcaagccatcttccttcctcagcctccctagtagctgggactacatgcgtgtgccaccacacctgagtaatgttttttagagacagggtttcgccatgttccccacactgctattgaactcctgggctcaagtgattcacccatctcagcctaccaaagcgttggaattgcaggcataagccaccatgcctggccccgagattcagtttctaggtctgaagaatgctatttattttaaacatatattgggaagtctaatgtgagaaaatgcatgtatatcatttagcacaactttgctttaagatggtcccttcatgtatggaagagagctagtgtgtggaaaagtgacatggctctaaaaagagaataaaagtcagagagtctctacatcttacttcaacaacgttggaaaatgcccttattgttggagaaggaaacgagtttatgattttagcctaagtgatgatgctgacagttctttgccaggaaatcactatgtcttttcaaaatattatatattctcagctaaggcttcattttacaggaactaatccaggaagtcttctatgaaatctctgaatgaaatgaacaattcagtttttaatttggcacctaaaaaagctagctgaaggaaaagaatgtctttgcagagacatttctgtcataatgagatagaatggtttcacttgggaatagcacactaatatgtattgattagattggaccagatctgggtggtccattggtggaatttagacccatggctcttacattctaccctcagttgtaactgacttacctgcttttatggtagaaaaaaacttctgggagcttagctaaatgattcttagctggaaaaatgccatttcaatttcagatgtttattggtcataacatgtgaacctctcctgccactgttggagagctacttttaattgaatgcaaattgtgttttcagatttctataaacatggcatttttcatgggttggtggctctgcccactgtggagaatgacaaacaaattatcatgcatcatatagcaataaaataataattcaaaaagaaaattgccctactcatattacctcatctttttggttggctggagagttacttacagatttttaggatactagagtgacttggtgcaagagttggggctcgtatattatagccattcataggtgcaagcaagttactgccttcacaatcagttcttttattctgtatatgaatatatcttctttttcttttttaaacaatactgcttgcgagtataatttatttcttcacttctgcctttgccctttctaaagtcattcactgtctatcattgcattccaccagtggaggagagaatctaaaaagttttgattaagctttgacctttcgtactggttgaaattaacgctttacagaattattcttttggaccataaaatatgtgtgtgcatgtgtgtgtatgtgtatgagatatagatatagatatagatatagatcattgatacttgcatcatactttacattttataaggcatattttcttattttgagtcatttatttatacaactcagtggcttagatttcatcccatggatgagggacttgacgttcagaaatctgtgacttgtcccaagtcaaagaacaaataggtagttctaaaaagaagagaaagtctactccttatctaaacagcacattttagggaagaatctgattggccctgattgcatcatgtctgaccctaaaatactgcatccagggagattaatgcctccagctgagtgggggctggggcacatatccactgctgtgtgtgttggggttagtgagggcagatgggctcagccccatgggaaccacatggtgtagaatcattacagagaggagagttctgtagcaaaagaagggaaaagtgagctagacaggaaaacaacaacacaatcattgacaactgataagcaaacaacyttagaaaaatcagaaaataggtattagtaacagaattttaaaggaaaattaaaaataggtgttgttgaaaattgtgtttcattgggcagacaaaactaagcaggatgagcaatctgaagaaaataataagctggaaaactgaatataattgcagtatcatttttttaaaagactcattagtacctatgagccattataattactcttaacagtgccctctttttaacccaggaaattctgcattttgaaagaaagtagaaaaacgtagacaaatgagttacagttttgaaattagaatgcatgggaagcattttgaaatctgtaaaatattctacctttgatgtcaaaagtcagagtacttgatatggatcctttaaaaaaaatccatgattgaggagattttgaaaaattcctagtttcttttaccagagtaattgtatgttgattagggtttgggtgttttttgttttcaatttggaaagaaaaagagcgtgcttagcccattccatataatattgtatagaaaactcaccaggtcttgttcaattgtgagataacactgattgaggttttatcagacttatagacatcaccatttaaacctaaacgaaataacaactccggtagttcatctgtgggcatcttccacttttctctgtcccactctgttataatgcacctcccatacaagctgtgaatacttaattcatttctttaataacttgctgtgtatacatagtttagctaatcatcaaaagtgttggaatgccacttttcattttatctcttagtctaccaaaggtcagcaaactctcaaaaaccaattaattgggtcactgtggcttatagcctagagctatgctcatctttattcaagtccataaccatctctgatttcaggtttggtgtttaggttgaatttatccatcaacgatgggctctttggtttgttctttgctgaggtattctagcactacctcttgagtgaataccaaactttaaagagctttttaagaaatgtcagaaggagagagcgagagagagaatgcctggctttgtgaaatgttgcagaaatttgtatttgtaattatcacaaatttaatcagtctttcctttaaatttttaaagcaattttggactattctcattatttcaatggtagggaaagtaacatatagatagggataggccaagtgacacttaaggtcaaatagcaagtgagtggtgaatgtaggtgaattaaaattggatggccctgtttttgctgtttgatccttagatcactgaaaactttccctctctttttttttttttcttttttcttttttttttttttcttgagacggagtctagctccgtcgtcaggctggagtgcagtggtgtgatctcggctcactgcaacctcggcctcccgggttcaagcgattcttttgcctcagcttcccaagtagctgggattacaggtgcgtgccaccacgcctggctaatttttgtattattagtagagatggggtttcaccatgttggccaggctggtcttgaactcctgacctcaagtgatctgcccaccttggcctcccaaagtgctgggattacaggtgttagccactgcgcttggccaaaactttccctctctttaatgaaaatgaatagataataaccaggtcctactatatttcagcatgaggctaggaaatgtgtatgcatatttcttgggaagtgggaggtgggaggtgtaatgattgggggagataaataggaaatagtccttgggctgaaggagttcgcagcaaagtaaaaagtttaattgtgattaattgtgcataatgacacgtaatcataatgggaagtaaaatatggcaagaggaagactttcaaattaagtttttttttttttttgtaatattccttaagatagaaaagccagccgggtgcggtggctcacacctgtaatcccagcactctgggaggcagaggcaggtggatcacaaggtcaggagatcgagaccatcctggctaacatggtgaaagcccatcgctactaaaaatacaaaaaattagctgggcatggtggcggttgcctgtagtcccagctactggggaggctgaggcaggagaatggcgtgaacctgggaggtggagtttgcagtgagccaaaatcgcgccactgccctccagcctgggcgacagagcaagactcatctcaaaaaagaaaaaaaaaaatagagaagccatttgtggttatgtaatttaaaagaaaattttggccaggtgtggtggctcatgcctgtaattccagcactttgggaggccaaggcgggcggatcacttgaagtcaggaatttgagaccagcctggccgacatggtgaaaccctgtctctactaaaaatacaaaaattagccaggcatggaggcacatgtctgtaatcccagccacttgggaggctgaggcaggagaattgcttgaacctgggagcggaggttgcagtgagctgagatcgcaccactgcactctggcctgggtgacagagcaacactctatctcaaaaaaataaaaataaaaaaggaaaagaaaatattattattattactatttttattattattattttactgttgtctgtctcctaaaatagcaaattgttgtttctacttcatatttataggtcattttactaagaaatcagaatcctgaaatttatctcattttaaaagatgatgacattctataatttaccgtcaagaataaaagattagtgatgattgaaggtgctggaaattaatttacactaaatagcattttgaaaatagtttggggaactttctgaaatataactagaaacttttagaaaaacatgactatagtatggtaagttgaatcattgttgatgagcagacacttatccttgatacagagatggatttgcaaaggctatgttacatatccgaggagatacttttgtttaggccatctggaaatgtgtgtatatgaaaaggttgcaattttatttttttaatagagaccaggtcttactatgttgcccagacaggtttcaaacttctgggctcaagtaatgctcccacctcagccccaaagtgctgggattatagacgtgagccaccatacccagcttgcaatttcctgaacttgttttattcattaagtaagactagttttgttttttaatttttattttttaaagacttgagttgatccaaagaagagagaagtggtaaattttaaaaaggatgcctagttataatcaaggaatccagtaaagtaaattaatctgttaaaattataaaacaaaaattttgcctgtatgatcattcctccctcaattttcttaaaattcatgtattaagagcagtgactaactgacaagaagcttctgtgccatttgataaagatttcaactacaaatgggaattaaggtatattaaaaaataaaattctgcatgacaaaatatttaaaatgttagtttttaatgttctacacaaatattgtcctacattttaacctagaaatctacgtattgaatcagcctataaaaatccatttctttcacaaataatgtagctttgagaacagatttttttcaataattctcagtctacaaagctatgaaaaggaagttgctgttgctgcattttttttaagctgtaaaatctaatatgccccagctctgatgaaatgtaccaggaggaacctgccttgtcaaacaggatatttttatgatgaaatgtgatacgaagaggcatagccttacatatatctgagagaaaattatttaagtggccataatagatttttcagaaattttgtacatttctcttatttgatccagatgcatttttttcctctgttgttctcataccagcttcttaatttcacctccctaatgttccacagcataaatacatctttgttcagagtttctccaagttatctgtgagaaaataaactatacaaagggtccctgggtatgttttaggatacatagattatgggggtgggagagttaccttgtgtgtgcaaatgagactgtatgtgaaacgaagataaggtttggagggaaatagatgattcaaagatacctaagaggtttattaagacctttaaaaatgattttacagtgcctgtaaagaggactgatatttaaactcattcagcttagtgaaaaaaatgaagaaaaatggaaagtaacatgcactacatgtgtacacacagaaacaagtataataaaactttctgccctttttttttttttttttgatatgaagtctcgctctgtcacccaggctggagtgcagtggcatgatctcggctcactgcaacctctgcctacccggttcaagcgattctcctgcctcagtctcctgagcagctgggattacaggtgtgcaccaccacacctggctaatattttgtatttttggtagacacagggttccaccatgttggccaggctggtctcaaactcctgacctcaagtgatccacccgccttggcctcccaaagggctggtattacaggcatgaaccaccacgcccagcccctgcttattttttaaggtttctagaacattggctgtgaacttttgggtaaatagtgcacataactcttctccttcctttttatttgaagtgcagacctgggtatattttattaaaataatggtctgaaattataaaaaatgttctttgtccaatcaaggagtaaaatcaaaccttgtattattttgtagttatactcagatgttagactatcttctagtccccagcagttcactctaggtggtcccatagctcttgcttgaaccacagtcttgccacttcttatccatagtgatgtgcacatcagttcccacaccagaatgtaaaatactagagggaagaattttggttgatttgtgtttctattcccataacttattactatgccagttcccagggagtatttattaaatggatgtcaatatcaacagtgagttaatgaatttttttgttggattatcattttttaagttgtacacatttacaatgaaaagaaaaccaccttcactttaaatcatgggcacagatatttaagtattttaaaatcaaagttttaaaaaactaacattggcttaaataatatttattagagaacttgtaacattttaagaagcattcacattctacctatgtatattttaaatttatttctgttttttacatctggaagatttttttcattttatcataaatacttgttttcatggtaatttataaaaatcagtttctcctttgataggattattacaaattatttcagaatctacttattaactggtcgctgttcctctctgtagtgctgaagaggcacttgcttgggaacaagagaagtgccgcaacagtgtcaataacatggatttttcatttattatctttaataataataatagatgacaataatatattttaataagcatctactatgtgtcagatgctttcttctgagaatggatattgttagtcccattatgtagatgtagagactgatactcaagacaattcaatatttgtcaagtagtggtagaagcaggatttaacctcagtctttctgactcttcatcctgtgttcttttcacccacagatggtagaggttgaaggctcagaagaacactttttgagctcagaaagctcttcttgtgacctctatgctactagtctaaagggcaaatgataattgcagctactttcagaaatggtcctttttccctaatgagatgaccaaatctgctttatgaacccagtttcctaagcaagatacagaaatagacacaccaatttagtatgataaaaggtgttaaaggtagaacaattttaggtaccaaattatatttatttgatacttggataatttaaaaataatgccacaaacttcatcccatctacctcccagtgcgcacacatttgggatgaagagataatgatgagaatgacattgtagataaaaggtatatgcattaaacatctgaaatgcttaggttattcaaagaaaagaataaacacaccatgtgatatgtagcctcagctacttcatgtttgaagttgatggtaacattcagatcagttttgagaagcagactgcaaccatagcttttagtttaagtttcagattgatatggaaggttatttgttttaacaatccctatgttaagttttcttttttctatgtttcaattgacttattttgtcagattttaggtttttttttttttttcaggcaagatggcattctcatccctgctgttgttaacatttaaagcatgcagcctcttgtgctgtggtgtaaattccaactgactgacgataattaaacagaaaatgaaacttgaatggcactatctcaaaatctacttaaagccacaacaggtatctgcctatagcaatatatcagttggaacacatgaagaataagaaattgtagcattttgtgtctgggtttatttttctttgaaatcaaagaagaaaaatactgatttttcctggatcactaaaacagtagtatggatttctaaacagggcagaccatacaaacacacaattaattatatctgaacttgaaatctcatactgtgcactttacctcttttataccagttgtaatttctcatttatgtacagatactgtagtaactttttttaaaaaaaagaatgtattattgtaattaaaaagcaaatactcaagaaagataagacacaaaggattaattgggattacaactcttctttctgtattgagtgcaaaagcttggtgatctcctgaattgtgcttcaacagtgacctcaaggctccttccaacccccaaggctctccttttttaacatttgttattacttagctattttatttggcagggatcccttctatctcatcttctaatgcactggcaatgatcctattgccaatagcttagagcctactgctgctggggtaagcgacacagccgaactttctagcctctgcatccttataaataatgcatctggtttcctgtaactacatgaactcttagactttagtaggcatttctttgttagtcagggtaaaagagttgggagatgaacagttgtggaaatagttataggcagttattatcactgattagaacctgagtccatgacatatgcattaatcactgggttaatgctaatggaatgcttatggtatttatagtagatataaataagatatagaaaaagaatatctttgctgaccaaactgcatgcttaattcaacatggaaagttctggtgaggttaatctaggacgctttgagactccgttgctcataattggacctgatttactactcatttaaaaaatctcttttaatttgcgcagaattcgctggctttttgggggtggacacacttgttcttaagaacaatagcaacaagatctttgtttaacataatatctaatgctccatgtaacttagtggtataacaaattattcaatttgtaatgaaaaaggtaaatgctgtgttaataagttaatagcaaagtaaataatgcatatttatacttttgacttcaaagtgtttataaacttatggcattaaaaagtaatgttttatttttgagcatcagagaaaatagtatttaaacaagagaaaccgatttttaaagtgaaaatcattttagcaacattttaaaataagccacgttaatataaaataagtgagttccatcgaagtatacactcttttcttcactagacgtgccttaattggacatgtcactggccaggcgtggtggctcacacctgtaatcccagcactttgggaggccaaggcgggcggatcacctgaggtcaggagttcgagaccagcctcaacatggagaaaccccgtctctactacaaatacaaaattagccgggcgtggtggtgcatgcctgtaatcccagctactcgggaggctgaggcaggagaattgcttgaacctgggaggcagaggttgcggtgagctgagatcacgccattgcactccagcctgggcaacaagagcaaaactccatctcaaaaaaaaaaaaaaaaaatggacatgtcacacagtgacaatgttcagtgttatgattctatcataaggataaaaaattcagattgatttagatgttgatgagaaacttgttgctctagagccttgtatattttcatcagaattaactgaaagaagggaaaattgtttctaatatgatacaggatgttcatcctgatcattttattattgatttctttagttaccatcagttcatctctgagcagctcattcatttagaaagatgatagcttgtaagtttaattctaaaactcattctcatccttgttagcatttgacatgccaatgattttgcagagctgggttgttatcaggactcatgtttagtcaaaatgtttaacacttatttctttgattcctgtagaatttccttattaattaacccagggtctataagcaacaaatttttaaatcagatatatatctatatgcatgtaattcatttttttctctttgatttttgactacttttttatgctgatattttagaatttctatgaaattaacacatttccttaacaattcaggaaatctgactaactgtactttaaaattgtgctttggtatcaccagtaaataagaaggcttcaattcatcaaaaagataataataaactgtattaatgctttcttttatttatttattttaatccatctaccaaaaacaatcaagacaacagctttaaaaaaatgcaatcattaaattactacgacagcctagtctgcttttgtggctgttttgttttgatggttaccgagaatggaaacagacagattatgtttttctgcttgtaattgtccagtacctccaaaggcctcttgcctgggcatgatcccttctggaattgaattctgcattcttcttctatcactaatcaaacaaaacactatcagaagaaaacatttccataactggatccggagtgaaggaaaatttcagatacttagacatgcatatacaataaacagtgtttcctgacaggctcattaaaaaagaatgactccactatgtgtcaactgcacaaatagaatccattataagactatggactcttacttctgaagtctgcctttgtgcccacctaagattaggaaaactaaatcttccactagaatttaaatatcacagaagcagaaacgattgcaatctctttccccagtgccttccttcctctttctctcagtcttgggtaggtcctggtacatatgaggcacttgcttaaaaaaataactgaaggaacgaatgaagttgcttaaggccgggagcagtagtctgtagatgagtcgactctcacctgtagtcccagtactttgggaggctgaggcaggaggatcgcttgaggccaggagttcgagactagcctgggcaacattgtgagatcccatctttacaaagaaattttaaaaattagccaggtgttgtgacatgtacctgtagtcccagccaattgggaggctgaaacagtaggatcacttgagcccaggagtttgaggctgagcaagatcttgtcttaaaaaaaaaaaaaaaaaaaggttgcataaagcagcagagacaggatcaacctagaatgtctgtggaaaaactttgaaaaagcatacattcttaaaaataaatgggaaatctgtggcagaggaaacagtaactactgacctgatcttcccttttcattttattttaatttctaatttgctgtaattgtatggtgctttcaaatactgattaaaactcttaaaaaaatgaaagagagaaatcacatttttctgctaaactgagtttgtggcatgccttcttccttcatcttgttgatgctcaaagaattatgcaacagagggccatcatactgtttagtatgttaaattattttgattcatgtacttactagcaacatcatttaaatggtttggtttcgtcatggccagacttaagacacatagcataattaagttgacaacctaatattccacattaaatcctggtgttggaaaaagctaaactgatcggagaaataaatctgtccaaagtagaaactgtaatatgtatgtgaacatgtatattctcatcatcactttttgttttcttcttttgttctctgttcctcctgttgagtcttgtgtaagtccaaataaaaattttattgtagagcccaacaacaaaaacaatgatctcttatgtaattgatgattttaaaaaatgctttgaaagtcttcttccatactttgtatcagtataaagatattgtacagtggtacagaaaaaaatggcttttgaagttcagatggtttgaatctttgcttcaccacttactagctatgtaattgtgggttatctgtgcatctttttaaattctcactttttccatctgtaaaataagaacaatatcagttactttgcatactgattgtaaagattataaataagaactgatgtatatatattacttggcacaatgtctgacctgtttctgtttttcacagtcaggcttctcttccattttctaaggtgactcggaccttaccactctaaaaattcaaatcatgccttcactttctgcagattgcacttgttactttagaagaaaaggaaaactataagatggaaattattttaatgtcctcttaccaaatctacaaaccccagcacaatgcctgtcacagatacggtcatttagtaaacatcttttggatggataggtggatgggtagctaagtaaattaacatacagattaggtctttggaaatggtagctatttttattacaccctgtacagtgaccttaaaatttgaaatctactgcttttgaaaagcaggtcatcctgaggttttccattttgtacctgccagattgtgaaaagaagttcatttcaatgctgcacagcacatttcctgatcagttggctgaattacagtcatgccatttcattttgagttggacaattcaagcatttagccctgatttttttttttgacagtaagttagttatttttatactcattcaacacatttttcccccaccacaggttattgtaaaaccacctgtctctgggagcacagttaattctgtgcatgagatttctaaaaatgttttacattgtcattgcagttttttaaaaatgtagagatccctctgctattcttttgcattgccaaatgcttaggtaccttggaaaactgcttaattggttcttcttatctcactagattctttggccttaggttgtgaatgggtaacaatcatttaacttttgatgtgccctgaagtttccatccaaaacttttttctttgaatcttttttagggtgaaagagaagaatatgggggatctaggtgtacattgatactttttagatgcctttgatgtcagtcagtaaacagcagtagacatttggaagagcatgatagaagagacagggctaattccaggtatttaaccccaagttaaggagacttaacctgaggctgggttatttctctgatctctagggacagagtagtggcaaagccttaaggtggtaaaatttttgagaaacacttctaaagacttatgttttgttttagaatcctatctaaaagcatttcaaacaaattaagttaagccgttcctttcttactggatgtgttcgggcgcagggggtgggggcaaaaagaagcatatggttgaagctctgcactgcagtaatttgtaaaagaagtacttttcctgctaggttaaattgctctgcctgcctcttgctgtcagggacatgatttagttaaatacggatgcttttagaggggctttgtactgcatcatacatatttaatagtttataaaatatctgtgtgaatcactgggtggagaatccagcagcagagaagctcaaccttcacattggagcctctggccttagggtccactgaccagttgaccactggaaaaggtgtgttcagaatgggagcgtcctgaataacccaaggattctactgatttcaacagaataagcttagcatctaacctttcagattttttcagtaatgtgaactttacattttctcaagtcacattattcatagatgttctaattccccagggatcgaagtatagcattaaggaaaatcccttctcaataaaaaaatggtattgggtgaggggagggggacagaaaaagctcttagatgttctatagcaattaatggttgccatataaagatacctcattgtcattagataatggttaaaattatatgaatcttttacccttgatataattttgaaattcatcttaaaaatcaattccttaaaataaaagtagtaggggaaagaggtagtgatgggtggaggctgggggatgatgcagagaaggaaaaaaataagcaagtggaggttactaaatgtagcattggtggattattttgtttgtttggcataggtaatgagttttataataaaacttactatagtatatcaagataggctcctttcatatatgaacccagaaacaccatgaaaaattttttaaaaagttccagcattttattatgaaattttcaaacatagagaaaaggtgaattaatcattcagtaaacaaacttatgcccactaccaagattttacagttaatattttcctatatttgcttactgagtgtctacccatttatctatcaactttttatttttgatgaaatttcctgtatatatgagttcattttacccccaaatatcccagcatgcatagtatatatattttattacattgtttaagagaacatgtaggtcatggattatgctatcaaatagaatatatgtttctctcaaataagccaccatatttggaccgagggttttctagtcatcatatttcagagtataactcagacagtagcagccttcttgttcctgttccctaataattactccttcccctgtcccaggcttttaattctccaaattaaaagaggatgtaacctcggcttcctgattcccagatactgataatttttggtacagtttgtgtttgagctactgcagtaatgttcgggcgattcccattttggtgacagtcttctttcctgaggatacattgccttcctatcctctgtagtttctttattctatactttcctatgtaagcaataaagctaattgtaatgctcccacaattcaggtagcgtctaatctccagcctgttctcaggggaagttgttgggttctggagcacacattttgtgtgctcccttagtttgacaaaatgctgtttaataacagagtccaaatatgaatattagtctctgaatatctttcagaaagaggcccattaagtagagttgtgaccacaagtggtcgtgggagcattaaagagtaaactttcaagtagaaatggtccagggaaacagtcaaagtgaggtattggtacagacatcattcatggctctaggcgagagaaagtctaaactatctaatcaagtgtgtgtatctgagttggcagtatgcaactaaaagctttcctttgtagaaattaattaaaaagaaggagaaatagatgtgattcccagtcctgactttgaaattaatttctgtgtgactctaagcaggttttttgtttgtttgtttttacctcccaataactttttttcttcttgtataaaataaaattcatgtaatgggtgcagcaaactaacatggcacatgtatacctgtgtaacaaacctgcacgttgtgcacatgtaccctagaacttaaagtataataaaaaaattaaataaataaaattcatgggtaaggcctgttgcagctccaacattcagtcaataaaaaaaatttaaatctaattattattgagattacagttgacctttgcattaaacctaaattcttttactccaaataactactgaaatagaaagaaaagacacaagtctattttcttttttctcccagtgtcttagagatatggtctccttctgttgcctaggctggtctcggactcctggcctcaggcaatcctcctgcctcatcctccctagtagttgggatcacgggcaggagcgaccatgttggacagaaaagaaacaagtcattcttaaacaaatctgactctagcaacctattgtataatttatggtagaaacatttgagctggaggtcaaatcataagatatttttatcttataactttcaaattcatatcgttttaagtaataaaaattgtaacaattttctgtaaacagaaaaggtttccaccccttgagctgaaaagcagcaggaaaaggagattggcatttcattttaaatgggatacgtctgcttccatgagcatcataaaggttatgaccttacggtagtgttgcctgacaggtggctcactaagaatgccaaatcagttctggaaactgcatatacttttatttcttcttttttttttgttccctttggtgcaactttgtattttcattttgatcagcaacaaggagaaaaaaaatgtgtgtactctaaggaaaacgtatattgtaagacattttctctggctaaggtcttttcaggtttagaaatgtgaactggccaggcgtggtggctcatgcctataatcctagcactttgggaggccgaggtgggcggatcacctgaggtcaggagttggagaccagcctggccaacatggagaaacctcatctgtactaaaaatacaaaaattagccaggtgtggtggtgcatgcctgtaatcccagctacctaggaagccaagacaggagaatcactggaacctgggaggtggaggctgcagtgaggtgagatcgcgccactgcactccagcctaagcgacagagcaagattccatttcaaaataaataaataaatataaaagagaaaagaaatttgaaccatgtttaaaagtagaatacttcaggtaatccctttcctcaagctttctttattctgggaatgttgtgcaagtatattttatacatgggcttatgtgaagtttcagtctcttgaatagctggtactctcttatgagtaattcataactgccttcacatgtgtataatctcatgctcaactgtttctctctattttaagcaggagatttaaaaatcaaattaacacatatttctagagcatttgctataagtgatatgctgtgctatatactgactaactacatttctgggttgattgggggaccagtttatagaattggctgacaagcaactgaactttaaaacaaatagctagtgcttaagtataagtcaagttcaatcactcccatttttaaaactttgctgaatttatattaaaccgacattggttattcaaggtatttcttccttgtttttagctaaaacttctcttactgcattaaactacatccattatcattttcattaaataagattgcacattggatatgtacataaaagcaaaattatatcttgcatttttgttacatttgccagaagaatgaaaaacaaacaacagaaaatttctctgagctgtgctgctctatgccctgaacgtaactgtaatagtgaatattaatgagacacagcaaagatatttgctcaaggtagctaagccaatatgtattgctccagtaaatgttagaaatgaccattcatccacataacctcagattagtctgcataaagataatgtttcttttgttttttcttctttttgtcacacacacacacacacacacacacacacgcacgcacacacaccacacagtaatttaacattatttgcatttactcacactggtaaaacacacgtctcaaagatgtttcccatagtttattcatccctcttctatgtcgttttcatttggatgcatttgcttaacaatgtctgctgtgtgccaggcatgctctaggtactggggatatagcagtggacgcagacacaagtgcatggtcttatggagctgacattctggtattgagtttatcacgtttgataagaaaacacagataatacaggaagactgccatttgcccctcatccttggcacttatttccagtggagtccttcatcccaaagatctcagacccgcacacacacacacacacacacacacacacacacacacacacagaaactagtaaatggatatgtcattgagactctgaattcaaaaggcttctgagaacatgagcaaaggcttatctttctatcccattttatatactaaaatattatttttctgttcaactccatcctatttccctatttaaaatatacatatcggcaggcgtggtggctcacgactgtaataccagcactttgggaggctgtggtgggaggattgttgaggccaggagtttgaggctatggtgagttatgattgcaccattgcattctagcctgggtatgaaagtgagaccctgcctctacaaaataataataataatagttcaaaaataagttagccaggcatggtggcatgcacctgtagtctcagctacttgagaggctaaggtgggaggattgcttgagcccaggatatcaaggctgcagtgactaggattgcaccactgcactccagcctgggagagagagtgaaaccccgtctctaaatatatacatatatatatataaatatatttttatatatgtaaattaatatcaagttcagagttcatagttaataattgcctgagattcactgccatattgcctattgatactttctagaagaaagggtagccgacacataacaaagtctcatttttccttgagttgaaattcacacagcaaaattaaccatttgaaagtcaacaactcagttgcatttattgcactgttgtgcaaccaccccttccatctagttccaaaacctctccagtggaattttaaaagaaggacaacttgtaaaatgaccaataaactgtgtttgtagaaaattaatgattttacttatggagagtgagaaattaataggttctcccaaagtaaagcaaactcactgtaactatcgtatgcaattaaaatatctttccatatgaaattctcacatcctcatctttgagatcatttactgtatcttcagttacagaggatctaaactcataaagaacaaaatgtaccagagtaaattgctcatcgtgttacagaatgagaacacagagcacagtcaatatcaagtacttgatacagcatctcacaaagtaatgcttaaaattaagtcaaattgtctgctctgagaacattttcactgggtaagaataatcagtcttgactcacctttaaagtgggcagaaaagacatgcccaggaaggtaaaatgagtttcattcatctcacctattttgcatcataaataatgtacaagaacatcacacagcacatggatttggtttgctctcagagaacttttctatttagctggggagagaggaatgacaagaaaaaatagttaaatattagcatattccaaattttccctccactgataggatctgtggtagttgagtttcgctagatcaggctaaattaattcaaggcatactttggaacaatcagagaaaatttgataaggaagtatctgaataggccattaaaagacttgaaaaaatggagaggaggagtatagagggtattttagatagttggctatgaataaagcctgctgatttattagagaccccataatctgtgtaatgcaatcccaatccaaagtaaaaccaaacaaaatgtatgtattgaatggacagcccagctctaagtttgggacaatcaaatactgatagtctttgccttcaaataaattgcattcttcagccctgtatacacgatgtaattaaatgatgacacatgactgtgaacatgtaccccaataaatggtacagttaagaaatgctgggtctatgatttggaaaaatgggaagggcttcgtcaaggagctgagacctagctgagggcatgttttttggataggtggaagaagctgacagatccattggtgtactttatcctccagagaagctgcaagttttgaaagtcaacttcaggacatggagctttcttgtgaaaattatgatttcataattcctcagcaaataaataaataattgccatttgtatgtagggatctctccaaatgaaacgactgctgccatcatttttattttatgttagataccatgaagtaaattctactcttttgccagccgtaaaatttaggagcaagaataaactttttcagtgataatatttttagattttggagataatatttttagagttatattgccaagatacaggaaaaaagtcaaagagaaaataagtgagtaataaggtcaaaagcaaaatgtcatttatcattctctttcatctgttggagctaccgtacattcttctgatgataaagtaaataaaagtaaagcagaatgactagcttgaattcatagcctagcttgaattgatgtagctgaggaattctagtattttttatttgatgatattacaggatgtttttcttcattgaagccagcttagaaggaagctgaaatattatgaaagtggatcagaaatacaaatatattttactttattctgccaaatcccattctatattaccgtgtctcttcttgatccaggttggcatactagcatttacttccttatcctctgtggcagattaattgtggctgcaaattctttgccactttctccctcaagatttatttcttctgtccttgagtctgggctggcacggtgactgcttaaccaataggatgcagtggaaatagtttgttctgctttcaggcacagacttttaagagaactggcagcttgtgttttcttcttcttggggtgctttctctcacaacctggccaccatgctgtgggaagctcaagccacaaggagaggccacaggttggtgcaccatttcacagtgccggctggcatctagcagcagctgccggtcgtcatgtgggggagccatcttgaacgtttccacctagttgcacctcacctgcagcaccagctgacgtcaaatgaagcggaagaaccactcagctgaacccagtaaacctacagaataaaatggcggttgttgtaagctatttccaggtggtttgtttcacagcaatacataactgaaatcgcttcccaaggaaagtcctggaatgagaccatggaagagctcatttgatttaaatgataaatagacagtatttaaatggcctatgcttaattcttataatttctaaaaattattaggcaaaattgtagaagtcttattttggaaactagatccttttaagtttgtttacaaattatattaaggtaataattcctatttcattgttacatattctggttctcatagtctctccttgaagtggtatgtaatcaataatataatcaaatgcacccttttgatgaaataacaaaagcagtatttttcagcagaaataggatgaatcagaacgtactcaaatcttggccacatagctatgtgtccatggcaaaattacctaagctgcctgggccaatgaaataaaaaaaaaatttaagataaatatggactgtatgggattagtgaagatcagaaataatgtatattatgaacctagcagagtgcctgtcacctgggtggaactcaacaaaggtagcttttattattgtgagggagatggtgataaaaggttaggtagtaaaaaattgtgtagtttatttttctaagaggacatggaaatggggtgttcctgggctttactggggtggagcttaaagggttaaaatgatatatccttgcagtttttcctacaaacatgcatgttttatccaaaggaaattctgacctctaaccccattcacactttcctttcttactcttttattgctatagaggatttgatgaaggcagaaaggcaacttctgggtcctagtcccaagggtagaactaatggagaattcttttattcttcacctcccatccttctccatttccccatttacattctttttccaatttggcggaaaaaaagcaatgttataggaagctggctgtctgcagattagtcttagcaccaaggtggaatgacttttgggggaaaaacagacacatcccaaagtctggctcatgtagtccaagggaaagagtacttgtggcagtccataggattctctctctgatgtgttgtcctagtctttgtataaaatgttggttttctctgtaagtgttgggtattttcagtgtaacagctagagcaatgcccagtaacttttttttttttttctgctgaatatgtttgctcttaatggttgaggtaaggtgaataattgctcttggtgtaagttaaagaccacttttctaaactatgggttatcatgcttggtattttctcctatctgcctgacttgaggccacctgaaccccattttggtctttgaaatttagctgaccttggccttggatgaaatgctggtgtattgagtataatagttttggtttaggtcaaaattggggaattcagtgccgtatatttcaactgggtgctttttgaagaaatcataaattaccctagtttagcataaacacctgctgatattgtttctgaatatttacatgaatattgatcattgagatcttactatctttcaatttgaatgctttaaatgcttcaatagatgttttctacaccgtgaaattgtatgtcctttgctagaatctttgtaagagaggtctcactgctttgaagtcaaataaacctagaaaataagcataggaattatttttaaacaccatttactgtgcagattatagagagatgaactcaaggataactcatgttgctcataaacttgtcatagtcatggttacatttatgcaaattggcacaggcttttgttgttgttagttatagtactgcaaacacagtttaagatgttaagaccctttaaatcatgtataattatggactaatttcatcttgaaggaagaagtgataatattcttatctcctgccgtttaaagctgaaacatacctcaaagtagtggagattgtgccctacaaaatataatgtgcttaaagcggattttctcaggacttgaattctaaattttactgcttcagggactcatatgatggctatgtagtatagatttagagagagttttacagactcctattgacataagtgaacaaaatggttccttggaaaccgtttagatgtccaatcacagtaagtgtggattacaggttcagatgcatattgtgtgcagtgatgtgcagcacagtgcttggggaagcctgtggtctgtattaagaacagtgcatttcttctagtgttttaatgactgttgttttaaaagaaaaaaacagtcagcattgaaactactgaaaggtaaagctcctgaaacctaacccaaaaggcatgctctcatagaaaactcttcttagtactttcagtgcggtgatagctgaggacatgtggtatatattacagtgccagggaatccaaacctctgcagtgtggagtcaccatgaaaggctaatctaaaaatgaagtggtagctttgctcgcatcataactctgttacttactggtgcttcctattagcttgacattattagtcttctttgggtgagatagaataaatggaaattcaaaggggaccacagcaggggatatatgggctgccaacccctcccctagcactcccttcctccagcctgtactcagcatttctccctgggcatgacaaacaaagtcttacatagtcattgcaaaaagggctaaaggcagagctgtccatggttaggaaaaaaatgttcaaactgttggttgaaaatcaggtaataacagtcctcttagtgaacaaaacttattagagggctagggaaggaatgctatctctcagcagcaggcaggaagaaattgctgttgaaaagcttacctctctagggaggaatcagatagcagacttcaagcctcaggtccaacccataaggtcccacctacaccaccccccaccccatccccatcccagctttgttagattgctagcatcgatcgctggctttctctgacccaacagtgggtgaaggaaagagactgaaagctggcaaggtgggggtggaagaagactgggacagcttttgtagagaaagaaagaaaaaggaggaaaacgggtgggggccatggggactaggcttaactgatgcctgcctgcctctctttgatttgatggcctttattccttctaattggataaaataggaagtcactggcagtcctgtgtggctggggatactgattttactcagaccagcctgcagctctagagtgtgggtagagagcggggagtgggggttgggagagggggaggaaagagagagaggagagaggacgggcttggatgaagaagggaaagaaagagaaagagactgaagcagagaagagccgcagaggaagaaagtgaatgagcactcaagaaggacaaagaggagtagtcgggggtggggtggaggcagggcggggaagggagtgaccgcccctcctggctgcactmttgcctccggagccctctgatcctgtttgcagtgatgctccgagggcaggcacctgctgctctgtaatgattcagcccctttcagccgtcgtcgcgttaacacaacaggatgctgttgctattgtcactactgcctctcctgccgccgctgctgctgccgccgccgccaccgccgctggtcctccttctgcttttacttctcctgcatgacagttgttttcttcatctgagcagacaccagcttcagatgctcgaggtgagaaacatgcctttcagtttgggctactggtttacttaattaatcagccggcagctccgtcgatctattttcgtccctgtcctcttgacgagcccgggatggtttggagtagcatttaaaagaactagaaaagtggcccagaaacagcagcttaaagaattattacgatatactttgattttgtagttgctaggagcttttcttccccccttgcatctttctgaactcttcttgattttaataatggccttggacttggacgatttatcgatttccccctgtaagatgctgtatcatttggttgggggggcctctgcgtggtaatggaccgtgagagcggccaggccttcttctggaggtgagccgatggagatttattccccagacatgtctgaggtcgccgccgagaggtcctccagcccctccactcagctgagtgcagacccatctcttgatgggcttccggcagcagaagacatgccagagccccagactgaagatgggagaacccctggactcgtgggcctggccgtgccctgctgtgcgtgcctagaagctgagcgcctgagaggttgcctcaactcagagaaaatctgcattgtccccatcctggcttgcctggtcagcctctgcctctgcatcgccggcctcaagtgggtatttgtggacaagatctttgaatatgactctcctactcaccttgaccctggggggttaggccaggaccctattatttctctggacgcaactgctgcctcagctgtgtgggtgtcgtctgaggcatacacttcacctgtctctagggctcaatctgaaagtgaggttcaagttacagtgcaaggtgacaaggctgttgtctcctttgaaccatcagcggcaccgacaccgaagaatcgtatttttgccttttctttcttgccgtccactgcgccatccttcccttcacccacccggaaccctgaggtgagaacgcccaagtcagcaactcagccacaaacaacagaaactaatctccaaactgctcctaaactttgtaagtagagagagagagagagacgatgatgatgatgaataaaaggggtgggtttgaggtccccaaaggacatttccctttcttcttgcattttagttgcctggttttgtttaagcaaagcctatgtttgagatgcttgggatggcattgaagggccgagtaaaatgatcttgcaaactccggatctgaaccagtgttgtaacagcagctctctctagccacatggctcaatctggtaccgggaatgaaaaacttcagcatctgcaagtcatgcttgaatttaagttaaattcaatttatttctaacacattttaaaattaaaacatcacgccatctcttatgttttatagaaatgtgactttcatataccagtgagtattatttkgtgtctttctcttccccatcatagatttcctgtcatctctctgttaccctctacctctcagcgaccccaagctgcctgtwgtctctctctccttcccgttccctaaccacttctccctacttttgtatcttaattggttctttgagattacagcaagtcttaagacatttacggtgctagcctctcactagcttgagacgactgctgtcctgcccagatggcactttcagttagtgagcacttactagtggcagctttattttgtccaggacacagtaggattctgcatgaaggattttcccaaattagttttgtcttctataatcaaatgtttaaatagcttccttggcagttgttaaaaagtacaagatccattagtgaggtacatctttttttttttttttttttttgatgtatgtcatcttagtctggcagattgcagcggcccagtttaataacctgtgatgtgcaragagcccacgctcttaaaaacaatacattcctgtttgcattgmgtaattgcaatagctttagagtggaaagttgacaggaatgaaagcatgactgttctaaatatcaatatagaagggaggagttttctgtagccttttaaaaatgtttctagtttatttttgttgtctctatctcctatcactttttaccatgaggaatatttacttagtagaaaagtacaagatcagaaaatttggttcttaataacttgcatgaaagctcttagggttaaaagagagttgacaatttctctgacgaaatgcctcttgtttttcctctggacagtaatgaagaataaagaataccttttccagacatcatgttcagtgtgaagtagtgcagcatgctgtaraaacacagaaaaacttgatttgtgcttgtaactcccgatcatttcacgaacaccagattcagtggcaaagatttaaagaaaaaaaaagtcttgttttctaggtgcaattagggaaaacctccttcatgcagacgctgctttgtatctttatcaaatccctgaagcatcattaaaggtctgacagacatcactgcctttgctgcctcttcccacctggcaaagtgactgggaaataatacccagatgaaatgacaggctataaaaagcaagtacagatcctgcaaaaagaagcgaaattcaccaggaggacaaggttacttgatcattttaaacttgtctttaattgaaatctgcttgaacaggtttcattgtccagagaaaraaaaaaatgccctttgaaaaacacttcaactaaattctataattttgtcatctgaggaaatcaggaaaacaaagaaacwtctaacacattttcctgatctaagaccatgtcagaaagtatgttgtgaagttttgataaattattttataaagtaaatttttctactaagtgttttagtagattacatattccttatcagtttttttttccccaagccagggcattgatattgtggcatctgcaataaatgggaaagatttactgctgcctaaaagcatcattgtggccagtttgaccagatgcacagctgcaacgttttgaagtgcatcggagataagcctagagaagcagtctgggaagtagttttctcctgaaaagttaggggtagacagttagttggttaagactttgaaacctataaggaaactctgttaattttttagactagttccttaaaaaaacatcaaatcttgtattgtaaaaattgtgagactactttttttgggggtggggagaggttgttgtggggagagtagtgtttgaaagggattggtccaggcagctttgtttttagagacttgtaagtggttgtttttgttgttgtttaaaaaggttgtaaccactaattaatggaaagcaaaaaaaaaaaaaaaaaaaaaaaaaagcttacaaagggattgtatttttcaactaaraaagtattgtttagtcacagaaagaactgggacgttccttttcccgtgcatgtttttgacataaactaagctgtcatggcttatatttgaaaatgacattatcatatgtgaaacatgctcttcagtggttttaggactttattctcccgtttccatttttttttctgtctcascatattcagcacattatgcacagagctgtagccttcaaggtcwtagactgttgaaggctaattgattcttctttatcctggagcctgagagagtagaagagagacaatcccagtaattgtgtctgcagcgttgctccccaaaccaatctaccwactaatgttagagttttattttataaatactagaattactccctcactgactcttgtcaaattacaacattctttgtctttgttataataaaaggcaaaatatgacattttaaattgccttaaggtatagtggctatgtcgaattttctaaaatgggtatttctttcataaagtaatatttcatattttcatgatattaatctatgcattcatgtaggtcttaagaagtccaatgcagaattggaatgaaagtatataagtatatatttttattctaaagtatttctaaatatggttaatggtttcccactaccacaatgattatattgtcatgatactaattaagtttttacttctcaatgagtcacataatacttgcactattcatttgttttgtctgggctttaaaatttttcctaccctgactgttgggagattgcaaacttagattatcataaaaagagctgattaattaaattatagccaggaaacagtggtaccatcttgaaagaaaatgttttctggatatgagatcctccctgcttgacaacagattcttggatgcaagaatgtgttggtattttcatcttgggcyaactttgttttgctttgtcctaagtcttattatgggattgtatgacaaaccattgttaccgcagtgacaataagaatcagtaaccatttgcaaaagatcaacatgatgagttggatataccataggatttctttccttctatttgaaagtgccgttcatttaaattctaatgcatccttcttctagttcttggtaactatgtttgtaggtatttcagaacagtgattttaaataacttctccccactttaatcatagccgattacagcctaaaatattaaaaactggaagagactgaaagatcttctattggaactgaataatttcataaatttaccaatgaagaaacccaggctcagaaatgcctattgaaattcttttattaaaatatactaaactctgaaaaatgtggcaaaatccaaagtattagaaaatgtctctgtctctgagaatttaaacacacacactctctctctctactgttttcttctatcatcgtatccttactgtagagagttggagctagagacgaatgtagcatcagactgagaattagggaagtactttaagtgggaccactgttcaggtgtgtgtttagtgcatatcactaaaattaaattttcttctcgccttcctgttttgctcttattaaattttcagtcgtggtggtcttttccctttttattagatcatccatactttgttcagcttgcttctgaaaacagcatgggttgcctagggtgagttcttccctcatatatagcagattgctctgtggctcacttcttttcttcataacccattttgttttctcctctctattcttttgtgatacccaactcagacttcttctcccctttccttcctaccttcccaattatgtatwgactcttttttatttttgtaattatgtcattttggctttataggtcagtatttcattgcatcatatcaaaataatttcaactrtctttaatgaaactttattgcattttaatgctgaatggcactttcatatattacaaacatacaaaaaaaatctctagccaatgaccaatataccagtttcttaatgacataattaaatcaaatttttaccttcttcttgatcttttcctcttttttttctttagtgtgcttgattccagtttttctgtttttggacatcagcatttctgtactcccagaaaacgatgttccaaaccatacatctgtgttcttcctccttccctcttccttttaacaactcttcatagtatccttttaaagtatgaaggaagaggtattttatagattgaaaaaccaaagcataaaaagttatgacttgtttagatgcccctgagaaccaggaatataacttgtccacagagtccattgaacgttctactacagcataaactacattccgtctacttttatgctcatgtttctacttttattacttttgctctacatcaatgctttgtttttcttctattatttcctctttggtttttttttgtttgtttgtttgtttgtttgtttttcattcagtgaaygtacgctaagtgcctactctgtgccagactctgttctagaccggttatatgacagtggaaaacagtagagtgcctgccctcagggagcttatgttctagtggattttaagaatctaattgcataatgcaatttgagatatttcttgctttcttatacatataccctcttcattcagcatttcttcttctttactgtcatgttattcaccttttgacttccactcctgtcttttcttaatatgttttcttctccatctaccaaatactgaacacttgcccagcaatgtcctttaactgacagcaatcccacctctgctaccaacaggctgagtagccaggggtgattcaccatatggcactatctaatcaaaccattggagtagtgagaaaaatttgatctgtctggccctttaggagcaccctcttaagatgaaaaatatatacataattcttctagcatgtacataaagattctaagattattttcagattctagagagttggtagctgtaaatatttttgtttctatattttgctcatatttttatgtattgttttggcttgcataacatcaagagtattaaaatattcccaagggtttttcatttcactgtacggacaaagactagaatctgccattaagttgtttagttcttaaactgaataaagacatgagttcatatactattcacatgaagagtgattgactagcagtgagtgaagttaatcctcatcatctcaaagctgattgtaatctttactgcagtgaattttatcgtgtgtatgcgtgtgtgtgtgtgtgtgtgtgtagacattcaaagggtgtttctgaataatataactagtatcttataatcatagaattttatatgctgaacatttttagagattatttgtgtcacttcctaagtgagaaaaggcaggtctggaaaagtgaagtgacttgcccagtgtcactacaaccaatcagtagcagtgctgagactaaaactgaagtcatccttacctttgctacacttgcttttcttctcaaaactgtttttagcatttattcaagtagcatatgttacgttatcataatttaaaagatttggttttcccatttattatttaaatactaattagtaaaacttttatcaccctatagcagatgtcttctttagagaagagaattttggccaggtgcggtggcttacgcctgtaatcccagcattttgggaggccaaggtgggaggatcacctgaggtcaggagttccagaccagcctggccaacatggtgaaaccctgtgtctactaaaaatacaaaaattagccaggggtgggggttcatgcctataatcccagctactcgggaggctgaggaaggagaatcgcttcaacctgggaggcggaggttgcagtgagccgagatcgtgccactgcattccagccagggtgacagagtcagactctgcctcaaaaaaaaaataattttacctttataatattgatatgtataagacacccctccggaggctggacatctgtctcccaacaatataatatatgagaaaatgttttaatgatcaacgttatcccaactgaaatgcgttacatacttagaaagaaattagttccttagtgcttaaagtattcaagcagtgacactgttgagggagatttatgttcctagcarattattaactatatttacttctgaagtctcttacaactctggttctctcagtttattgtctcagggtgttagctttccagtgggtaracttgactttcaatcctacttgtccctcttcatggccttgagcaagttagaccatcatgttaaatctgtttcctcatttaaatgtgataataataataatatacatgtcttgaggctgttaggagattaaatgaggttttggaaaactccaagtcctaggcctgagacataaaaaatatgaaaccagcaccaattttgtccctcattctattttaactccctgcctcactttgttctttttctcctytgatcttgacagtggtttggtaacaatgcctggagaatacattttggggttttaggggaaccttatgaaaaactttgaaggaagtgaagagttgatgatacatcatgctaaagtaggaattatgctagaaactcgagatcaaataccagctctacctcttgcatgctgtgtgactttgaggaaatcacttcacttgagatttagttttacatccaaacaaatggggatgttaacatctaaaactctcaagagattgtgataaggacaaaagtggttactgtacctaaagaaaacagagcttaaaaatatattgaattccttctttgccctttctatcagggttcgtgtatgcatatattcacaagtgctaacatttctagaaataaattgtaggggttctttaccagtgaattaatttgttatgccttaaaatggtctgtaggactttactaatttcttgagcccagtgtcataaaaggagtattttttcccttatacaaattggttagaatacatagattattacctttgagttacatagattattactttttgagtaatgtccaaaaatcactgcatgaggggcttcattatagggaaagcgataaggagttacttttgagagaggaaaagactgcatggtatgtaaaattgtgtttgtcaagtaagtactgtttttggaaagattgggacaacggaaaacaatctatacagtttagatgtggtgcaggggaagaacttggctagaaataccatgaatcctaagattatgttcaccttactctttttattgttccaaactgggatttcctgatctcaaaagatgggaattaacgtctatgagttgttttcagcatttgacaaaaaccatggaaataatatacatcaaataattttatatgagccaaatcaaatgtagaaattctttgagtatactacatctatgtgtatctatgtgtgtatacatacatacatataattcatacatataatattctaaataaaggggaaaattatttgacaataaaatgagcagataaaaatatttttaaatttggacaaacaggttgtttattaataggtttgggaggggtggacaaaaaaacttctagccctatgcctaactgctagagtaaaagagaaaaaaaagtgttttaaaagtaaaaaataattggagcttaagtatatattggagattctgttgcaagtaacttaaaatgaaatcttactagctggattattggccagaatcctacaaaaagggaagaagccagtgctgttctagatatacacacttaagggattttggtatttttgttgtataccttatggtttttctaacagacagatataagtttgtaagagcttgccatttacaaaaatgtatagtagtgggcataatatatgtatttttatttattctttaaagtagaactagaaatatgtgagatcctttgttcatcttgattgttattcactcaagtataatacctttgctgcagaaattgaactctaaatcaatactggagcaatgaggcagccccttcgaagcataaaatatttgataacaatctagagtatgttttgcctgggtataagttttctgactgtacaatggaaataagctgatggacccaataaaacttggtgaaataaaatggaaagcttcctcaggtaaaatattttaaatttttcatcagaaacatgataggacaagacttgatttactgtgattttcagtgataggcacttagtgtttgagttgcatttcatgaggtggttgtctcccarccaaaggagaaattcatgaactctctttgaagccagagttagcacagaatttaatatgcatgtaattatcaaatgtaaaaatcttcataatttattttagtttaaaagttattaatttaaaattaaaccaaatgtacatatatgcatatgcatttggaagaaagatgagagcaacactgaagacaatgatagttgccattaggaagaaacttaattcataggcaagcagaagaccctatatcttccagttcctaactgtgttgcctgtattggtgtacaatgtaatataattttgtttcccccgtttaccttccttttccctccctttgtttctttcatacttgccattcacagttactcttctctttcctctattctttcataccccacctattccttcttctccagcgatctcagggcacatggctccacacttctctctcccaccctgctctgaagccagtgtcctaaagcatcagaggttatagagtagatggcccagacctgtggtttctcactggatggttagtgggagagagtgaatgagaccttaaccacagtcttgaccatgattagcctgatgactttcagtgttgcctcttcctttgctaagtaacaggaagtaattgttttatgaaatatgttggtgtcacagcaataaaagctccatacataaatggaatgatctaaggatagtagaattgaactcttgttagcatttgtttgtaatcccttggtagagcttcctgggtcataattgcttgctcttctgggagcaaaaggaatcagtaaccattgattgttacatgatgctaagtactgcctacaaagcaaatcttaagaatgattagtggcagagttcagggttactactctgatctctttttactataatctttaaagcaagctgaatttcacagtttttcccatcaagcaactcctatgattcttcaaaaggaagagaaaaaataatgtcatgtaatctataaaagcttcagttgacatcaaaaacaaacaaaaatatgtaaaataattacttcagtttttttaaatcttcctacttccacgataacagggagacatctaaattaacccctgaccagtaactttagtcttgcatgaatatgatccttataatcttaattgatctgaactatggaacctgtggtacacagtcaataacctacatagccgctgcctatttagtaaactatacatgtaatcagtgggatcaatacaaggattctcaaaatccttgcaaaattcattcttcaagattgctgagttttctgaatagctgatgatttgtcaccttgaaacttttttatctattttggattgaaatcttttaataacttacaatactagtgactactgtcattttaaatgggatttattgaatataggatcttcacaatgttgaatactgtgatgtctttaggacatagttgggttatgttataactttgttgacccctgttatttcgttaggacatactgagttgtattagggattctagctcttttactaaataacccagacctacgtatgttctgattgtatkttgggttattacataatcaaaattagcattacagagctttaagccaccttagagacactttgaaccaaatctcttattttatcacagagagacaagcccaaagatgttaaccttcttgccagagaccacatagagccagaaaatgttgatattttcatctcttctaggctttcagctaccaggtcactttgcaaccagtgtatgttaattgaaacattttttctgcacttctgatgtatagttctggtctcctgcaggtttaaaaggcaaattttaatcaggttaaacatttgtattaaacatttatataaaggataaaatctctctgagtgagattctctccttgaggaaatgcatacattttggtgacatgttttggtgacatattttgcttatatgtcactcttgctctgttctggatcaacagagttcaaggatgagaggtgaatgacaaatgaagaggaagagtaactacttggttctgatggtccttggatttatagcgcagatttaggggagctgagtttaattcctagatgttttatttgttcacttgttcctcctttcataatatgtagaatggcagtaataaatcttttcttttcttttcttttttttttttttttgagacagagtcttgctctgttgcccaggctggagtacagtggcgtagccttggctcaccgcaacctccacctcctgggttaaaccattctcctgcctcattctcccgagtgctggggctacaggcatgcactatcatgcctggctaagtttttgttgttgtttttattagagacagggtttcaccatgttggccaggctggccttgaactcctgatctcaggtgatctgcccaccttggcctcccagtgtgctgggattatagccgtgacccaccgtggccagccagctataaatctttagaccttgatcatgcacctaattggaaattgttttttgaatgtatgagcactactaaattagtcagtgggcttcatgggatctgttttgaaatttattgtgaaaccttatgatttataaagcacaaattacttttattttcatttcttgaggacaccatagcaccaatatttacaaagcacgtatctcataaactctcttgtgatattgaagacacgcctgcagcagaaccccaaacttcctgtcttccctaactccagctgtctccccagtcttcatcccgatggaccatgttttagccaactagaactcgaccctgaatattattttttctcttccatgtttttgctcattctattttttctactataaatgtgctcttcaaacagtctctcctctcccaaattctacttaggcctcaagactcacctctccaaattagatgatgggacccctcttcttgaagacctcctccaaccccccataacctattgsttgtgctttatcacatttagatttgtgtgttcttatttggatgcttgcttattgctcatagtagactgaccatttcctaaggcccagagttatagctaactcatttttatgacctgtatagtaccaaacagtgtacaggttgagcatcccaaatatgaaaatttgaaatctgaaatgctccaaaaatccaaaactttttgagcatcaccatgatgttcaatggaaatgctcgttggaacattttagattttggattttcagtttggagatgctcagtggtaactataatgcaaacattccaaaatccaaaacamttctggccctaagccttttggataagggatactcaacctatattttatatgaagtaggtatctcattcgtatatttatggaataaaagttacactgagggtaacttgcttatgggagtggaagaggaagaaaataatctgaaaccgggtcttaaatcactgacattttaattttgaagaattcaatatagagtttagtcattacaaactttgttgagacatgcttttggacattttaacatataatttgcaaagtcggacgtgatttaaaaaattcacatcatggagtttaagagacttcaggcagcaaagaattttatttcatgatagtatggtgattaagagcacacactttggaaccagattgtctggctttaagtcccagccctgtctccggctgtgtgacagcatgcacactatgaactatctgtgccccgattttctcatctgtgaaatggtggcaataactatactttcctcaggggctttttgtgaggatcaaatgagttggtgttcataaagtgtttggaatagtctctggctcatagcgctatataagcatgagctgtcrttactaggcagttttaacaattaaagtgcatttccttagatttcaagtttgatagcttgtgattacaataacaggcttcaggaaagggccaggaattccaagggacctattgacacagctatggatgtgctactatttattttggtttggtttgttcatgtggtttttcctctgtgtgatttatgtgttaccatcatacctgcattgttctcaggatttaggagaacagaaaaggataatcatcaatctacctgtcagtcagaaatagagcgacatggatggtttgaataaaaaygctgccctctctggcaaaatgccatctgttgacattgacatggacaatcatatatgtgtatatctgaatttattgctgtaacttcttattctgtcataaaatggtggacaaattcacaaggagaaaagtaacttatcttagttgttgaagaactgttgcaaaggctttgaattctgcaatgctatcattttaccaagacagaaatctactcattatccagatgcactcaataaattaatgcgatgatgggtcctgtcattgataagataacagtgatttggaagtatctcagtgttattaaacaagatcacagaagagccattaacattttaaaaacagagagatcttgtagataacctaatcaaaatattttactttactcatggggaaactaagatccagaattgtgaaatgactgggtcttaaatacatgcagctagtaagaaacacgggctggtctaaaaaacaggaatgccacttcatttagggctttttttttttttcaatatcccatgctgcttcttataaattagataattctttaatggtggaagactttattttttctgttgttctatattctttattgagtgcctgctcaatagagaagagtttacctctaaaaggagaacaaacaaaagaataataaacmagaaatcatatactatcttagcaggcrtatggggaaaataagtgtgaggagatcagagtactggtggaggagcatagttattttaaatagattaaaaggtacaaacatacagtctgatagaagaaataacacctagtgtttgatagattagtagggtgaccatcgtttctaagagtctattgcatgtttcaaaacagttataagagaataatttgaatgtcctagcataaagaaaaaacaaatatttaagatgatgcatatcccagttatactgatttgatctttataaattatatggatgtattaaattatcacatgtacccccaaaagtgtgtacatctcttatgtatcaataagaaataaaatttcaaaaatacccttaagaaatacataaacagaatggtcaggaaaggcttctttgaaaaagtaacagctgatgaaaggcttgaatgaattaatggagttaaccatatggccatatggaagaatgttccagactctgggaaaaggccttactgcccaggcagaaggccagtgtagtcaacttaagccaatggcttaagtgtagcatgggaggcaggaggtattaaatgagatcagagaggtgatgaaggcytgatcagggaagcatgccattcattgtaagaatgatggcttttccaccgaaagagatgaggaattattgcagagttttgagtgaccatgggacttgatgccttaggttttaatgggatcactgcctgctgtgttgagaatagcttgtggagaaggatcccaagatcccggtggaaatagtcggaccactgaggagattgttgctgtaatccagatgtgtttgtaggagttgtaggagggaatgtaaagacattattggattattagattctgaatatattttgaagatagatttagaatgatgtaatgatgaattggatatgggatttgagtgagaggagtcaaggctgatttcagtctaagtagttgaaaggatacggttatcaccaactgagatggagatgatctaaagatcattttgctcagtctcccaatgcataggtgccaaataaatcaaggttcttatcaaaattagaactgtggacattaccttctcataaaaataaagcgagatatgcctgagagcctcctgtaaatcaatacrgctttatgtgtgactagagatccttataaatacaaaagaaaagttgcagtgaaattgaggatgtctgcctagactactcggtaacactatccagaacccacaacacgtgatgatggaatgaagtcccagggggatgtagaataggcttccaacaaaccactttattcctattttatggtttctttttaattcatcttgttcagcattcaaacctggttcaagttgttcagtttatctaaagcatattgccccatccctctcagctcactttcagtcatcttttaaactttatttcagaagtctactcatcttagaaatgtgcactttatccctaaggtgagctaagtactttcctctctttcctctaggctttgacagtatccagtattttccacccgtttcccatgtactctgctgacatgcatgtattcctcaaggtcaagcatttcttttatccatgwacagatgcttcacatagcaccatgtatactataagctctaagactttgaagtacttgcatgtcccaggtagaggtttttctcctttctctattaagctgtcaattttctatatttatgatgaaaatacacagcaaaagtagtgtaaatgcttattttacttctcaaattactcgtcaagttgccaaggtgccaactattttttgttccacatattatatcttctctacttcactttctggaaagtaaaaagcagcaaaaaggaggttatcaagagaggagaagcaggaaaagttctagacagtctacttcatttttctcatattctagtactctagacagggtgaaggctcctgttgcagaagtgatggtcacatattcctgcaaataccaagtactcagttcagcccgtgcctgcagtctcttwacatccctgtcctcctctgcttctcaaattttacctactatgcaaagtcttgatcaggttccactcttctttagagacatttcctatactctgtggtcatcattaaactttcctccttagtctctattccagcagctcgaatcatctttaatactcatgtgtgtatttaaacatccatcctaccacataggtgtttgattcagtcatgtgtgttttatattatgaattaggttttaagtctcatctttggttttatttacctcctcatacctagaaaaacagattaagcacttgttctytacaaggccctgggttcagagtagtagaattgagagagacagaaagagctagtttctgtcttccaggagcttggtttcatcaaagacataaaagccttgccattaactggagtataaggtagtatatgagatgtatgaagaaaaaatcctttagtttgaggtgaaaaaaaaaaaccaaaaaggaataaggctaagaaggaagagaatcagaggcatcttcatattgcatggatagttgaggtgggccttgagagtaacatatgattctgatgggtgtggttatttcaggtgggagtaaaggcccaagggaaacagacatgttaagtgcatggtgagtcggccagttgagtcagtatgaaggaatttgctgatagcgaacatttattaagcacgtattgtgtgttcagtgctttgcatgtattgtctaatcctcacacacacaaaaaaaacattgttcctttttggaaataaactgatggtgtagaaatgatgatgatgatgatgatgatgatgaagatggtgatgatagtgacaatctgaatggtgcagaaggaaatgggatgccatgcatgagtctaaggaagactatgaggaaggaataccactgaactaattgaatgcggagaaggaaggaaacgattccatgcacattagtaatttagcggttgttagattaatgaatctctgagtgacaacctcatacatttattcaacatgtatttattgggttctcctaagtctttatgtatttattaatgtgcaaaatcagtagatttatgacaggaagtgacttgtgctccaatttccagaaaacattcattacttcttcctgatgaagctgctcagttaaataatattaattgttcttcccctgatgttatacaaaaattaaaattgatagaatacagaacttaaaagacatttttactttactttttgacattattcattgtttgttgctgatgaatkaaacctcttttcgagtgtgtgttccctttaataggcactggtaatttatgtactaagatttatttctgtatggaaattacaagtgaaatttcatattgaatttatatttagcctgttctagtacatagtctctgcatagtatatccatggcatcctacttaatattacagattcttttatattagtgctgctacatgtgtattctcaagcttttaattgtacaattattacaaaaagaggtaaaaatatttcccctacaaaattgttgctgttaattttttcctgtttattcatggagtattcaaagaagagctgtgtgttcattacattccacaagttagtccattcagtttgttcaaaatatgaattctgatgtccagcagttaatataagattttggcaggctattaataatggcatactcaatttgtagctctttcatccatgtaattttggtgatgtatgcactatgttccagggaaaggaatagttcaagattaaagaggcaatcagtgtattggtgcttattttcagtgtgtcaaagctgctaaatgaaagggtgcaatttctacttgtacaatttccacttgtgctgctcaaaaacaagccattgatattagacgtgtatcaagcatacgtggttgcagatgtaaataattaacattaaaaacattttcttctttagttgtgtatttagaacagtgatacttagttaatatcaacagcttatttttagaatctgaattttaaaagtagtgaaaatacttctagtgattaaaacaatgtatgaaaagaaaaaaattagtaggctattttaatataattagtgagtatgctattttaacataattcaaagatgcattcctattttaattaaagctcattcagtatgcaagaattccagtttccattacttcttgctgctgctgtctgatcttgtgtttcttgagggacacttcttttatgagcaattcttttgcatttgcacccagattccttcacgtccaaagcagtagtttaaaagagaaggctacatttttccattttggcctggaacttagatttttgttctgcttacttcttctttaagtatagtgaatatataaacttgtaggcactcctttgcagacagacttcagaatcacatgttcagatgaatgtgggaatgtaggcagaaatcagaaacctgattgtgcttcaccgcttcagaccctgccctatgaggccctccttgtagaagaagaaatggaactgaaccaataactgaagtgaaaaacccttctggaaactgtatatatgaaaagattccatttagatccattgaattttgcctttcattttcaaacttgcaaatagaagcagcattttaatatttttcaagagggggaaaaaaaagagcgtggttccctggccctattgtatcacttccattttgtctggaactgatttcatgcaggagakgcactggaatcagcatgcaaattctatgtggctgttgttcagtctgtttttgattcatcgtggtaaaatatgcataccatgaaatttgctgtcttagccattgttaggcgtacagtttggtagtgtcagatgtgttcacattgttgtgagaaagagctccagactttgtcatcttgcaaacatgaaactctgtacccattgaacaacaactcctggttttccccaccctccagtccctggcaaccaccattctactttgtgtttctgtgaaacatcatataagtggaatcatgcgttatttgtctcatgtgactggcttatttcacttagcacagtgccctcaaagttcacgtgtattgcaacatgcatcagaatgtccttcatttttaagactgaataatattccattatatatacagtcatacgtcacttaatgacaaggatatgttctaagaaatacgtcattggaccatttcatcgctgtacgaacatcatagagtgacttaacacaagccttgatggtatagccaactacacacctaggctaatcgatagaatcttttgctcctaggctacaaactgtgcaagtatgttactgtactaagtagtataggcaattgtaacacaatcgtaagtatttatatatgtaaacatatctaaacagagaaaargtacagtaaaaatacagtattataatcttatgggaccactgtcrtagatgcagtttcctgttgaccaaaatgtccttatatggcacgtgatggtatatgccatattttgtttawctcttcttgcatcagtgaacacttgggttacttccacctcttaaccggttaataatactgatatgaacatgggtataacattctaattawgttttgttcatctgtggtgggtgtgaaagttaaaccaatggaacctttttttagtgaatttagtcaaatttctgaaaamcaagaattcctatggaaacatactgataaacatacttttcttattatatattaaaaatgcttgtagggaaaacccagcttctaatagtactctgggtttgtgaagatgcagtaagtgcttgctaragagatgtttttaatctagagagctagagcagagacttagagttcacttgtttcttctctttttttcaatcatttataagatctctcatcttaactcattaaaactggctgattgactttgattactgacacacccaaactatttcaaaccagttagttcaaaaatgcagttgcctctttgaattatttataaaaaggatctcattacatttttccatarataacgatgatggcaaaggggaagaagggatcattatgccactcctttaaaatgcgggcttctggcctggcacggtgactcacacctgtaatctcagcactttgggaggccgaggcaagcggatcacctgagggcaggagttggagaccagcctggccaaaatggtggaaccscatctctgctaaagayacaaaaattagccaggtgtaatggtgggtgcctgtagtcccagctacttgagaggctgaggcaggagaatcacttgaacctgggaggtrgaggttgtagtgagccgagatctcatgactgcactccagccagggcgacagagtgagactccatctcaaaaaaaaaaaaaagtgacatgctggttaaaggtccctgtccatatcccccttttgcaactatttaatccccagcaaagtcctagccaggatttcctggtaagagtttttctgctctgcgttgtcaacagactattttctccaactgagctcatggaagtaacctagtttctatcactagtgggtctcagtcagaaaaatatgagtgtaggttattgaagtgtcagggttgtggtggccctcttggctgtgtgcttactggggatgaagtacatggtggaatgaaggctcttactagggagacttctgagttactagtttcaccacacagctgtctcacccagtatcttggaactgtttcttgcttcatgtgtgtgaaaaatatagtaaatttcctggtcatattttagcataattaattataccaactattaatttaatattttgtttgatttttagtttccagggtaaaacattaattttctctttaatttccattctataagawtcctattgttttcagcaaataggagtttccttctctgtaagcattgctgactcaagactatataatgttagaaatagaaaaaagatragaacatgttagtatcaatagcctttattattataatcggtatgggcctaacttctgctagcaacattaaaaatcttttcttttactctatcatttagtaacggattttcttttggttgtgtcgaatagaattgtttccttgatgttccttgatagagagtgttctctttaatataggaatacagtaaagaaagcatccacagtttgtgaggcagagtttagtgctgatgtgtacagaaactcaagtgatatttagacaactgagtccttactgggaatcacttaagccttaaaacatctctgccattatgctgcttattttacattgttctggatagatgctcattatccasttctcattcatgatgagcatgggattgataagggagctgacatgaaaattatggagaaaaaatgcaaatagcaaaagatagaataaagcatgtatacctcatgatcattttccccattgatattgatttggactcactcttgatgtatcaggtgtgttcaatctttggcaaacatttagggttttcgtttttgctgaggtccacttgaaccctggagcccaaaagaagtaaccaaaaatttctatagcttagtaaattccatgttctagaacttttmatgtggacctcagaaaaaggaaataaccaagagtgccgaaagctacatgtactttgaattgttcagcatgtataaaacccaatggctaaccgtgtctagaaagaaggagataagtaaagtaagattggagcctggcgtttggagttcagcaacttttctctgttgtgcgctgacatttaagttaatagagtgatttctggtggatttctttgaaacaagacagttcatctgagatttggttaaaaaatatttcattactttgaggaagtgattagggttggtcttatttagttggggctttcaaaattgatagttttgcctgatgrtatatgctaaaacattgaattgtgagtttcctagccagactggaccctaagcccatcatttggaaatagtctttcttatttttgttattcttgtatttattaaagaacattggactagtgaaaattacaaaagaaaggaaaatgacacaatacactacattctgttgtatcccatttctatctcakggaattatgtgtgtttaccaaactgatgtctagatgaacattcaatttcgtatcttgccatttaaaatttaacatcatgtgcatttttatgtcattaaatgtccaaacacctggaatttttacgtttgatttgttattgctaaaaagtacttctcttgatttttaggggttttcacttttaattaaaacatattcttgaaactccttctcttctccttggctaaacctgttatgctacaggacttcaggataacttgagctgctttggctctttgattaagtgcagatgtatttagggtttgaggtgaaagggtttttaggacaaatcgcattccagtttgagggaaaaagagagagaggaagttttggaagttacaaattcattaaatttttgcttccacatggaatccacaacttttccttttccctggctgcctttctcttcttcattgagttttccaggcctctcttccttctgcacaggctccaaagagaatggctgactataagggttattagtgatattttgggagttattccgttcttatccactctcccaccaacacacacactctcacacctcctcccatcaaagcttgggatctctgggaacagggaaacatatcaagatattagaagaygtcaatgttatatatgcagaaatggtgaaaaatcaatgaatttagtaagttaaatttgtttgggtagcattttaaaaatatttaagtactttgacatatgttaccccctaatacacagagggtgctcagacagcatttgctacaggagtgaaccctggccaaagctgttttaaccaagggacagtggargcccagagaggttcgttggtttgcttaaaatcacacatccatgggtaagcaaggtgatggataatcagctcaattgagtcagtttacattgtatacacataacaaagcatcatgttgtgccctgtaaatgtatagaattatgatttgtcagttaaaaataatattaataaagtaaataaaatcacacatctcacattgagaggagggcagcctagacccagatttctgttagccccargaattgaggcatatatgggagactagcagacaacacacataggaaacttttgccacttaattattattctttttctcaagaccactatattcatttgggtttgttcttatgcttttttttttttttagcaaattaaaaaaaaattatccttgaatgattctaggttagctttttgactaatggatgttggaaggagctcagtgacaaaggccagggattattttgcttttcctcacctcttcctttgttcctcctcatcatattacaaccttctgcttcaggattccttctgctttttagcaggattgacatgctgggccttacccggaaaggcaaaggctgatttgattagggaggtctttgttccaggtatctcrcatcagagagccttcataacaaatgagaggartggattagaagtttcctggggataattttttgtctaccctttaagggaaatcttgccttcattaattacatctcaaatggaatatgtggaatatagacattttcataatcaacaaggtgattttcattttaaaatgcttaaaaaatgttaagcagcatgtatgcacgcacacacatgcaaccaatttcttscacctttttcttgttttaattcttaaaatatgaatttttaaatataaggaaaatcctaaaagcagaaactaataaatactaataaaatgttaattacattgattaaatcattagtattttaagatgggcccctgaaatgtctccataaataagcttaatgtgctttcatttaaacaacaattcagttagtaaattcaataaaaagcaaactaatgtgacataaacatatttatgtgattagaaaatcattatatccactttaagtgaaaagaaaaagtcttcatttttgtgttacttttccaaacctccttttggcactgaattgtactttatgggggtgtcttgtcatttttttctaaattaactacacctctgcttgcctggaaactagagccattctgacttctattccgatatgtgtktttcatctcctactttttttttttttgagacagtcttgctctgtcgcccaggctggagtgcagtggcacaatctcggctcactgcaacctccacctcccgggttccagcgattctcctgcctcagcctcccaagtagctgggactacaggcacgtgccaccacgccccactaatttttgtattttttaatagagatggggtttcaccatattggccaggctggtctcgaactcctgaccttgtgatccaccctccttggcctcccaaagtgctgggattacaggtgtgagccaccatgcctggccttcatcttctactttttttatttttaaatattttttattcactattgctgacatcactctcctacctactcggtattctttcattatgagaatctcccacatgaaaamtagtggcacctctggaactcccaaattctagtttagacagattaatccacatttatgttactatttataacagcacaactctgtaaataaatccaaatgtccatgatttattggttacatgttatgatattctgtagaatggatattattgtagccaaaaaattaatttacataggtacacagatgatgacatggtaagctttctttaattagaaaatgtttctttcatttaatatctttcatcttaagatcaaaaacaatcttgcaatattgaccttacagcactgttcttctgttatcctcattaaaataatatcaataacaataatagtaataatggccattgttgttgttatgttctctgaggcatttagctcagagaatgttgagaaaaaaacctgacaaagtacttaaatattcttgatgccatctctctcactcttcataggttgtggatataaagaactctgtttttttcattttttataagccacaaacaatgaagtaatcatttctttgttaaaacaagaatgtgcagattattctcactgaaaagttaaaattgagttgtatttaagaataagcatctagtcttgaccatagtgtttatgcctataattaaaacaaaccaaagccaaaaacatatctttcaaatggtttggtgtcacaccacaaagcgagttattttaaagccattggaggattctagcaactgagcaaataccgctgatctagtcaatatcaattgataatgtattatatgaaggaaagtaaaatctctttcaaaactttatacatgtttcaattcagttaattatgtaataatagaaatggcactatcrtataagagggtagatgatataatttatagatcattttatcacttaaagcacctctaagtgtagaaatagaatcatagaacctcatattcaaaagcctttctgtttatctatagtggaatcgattaaatcatatttgtgtaataaatgacagtcataacaaatacagtaattaaaatacagttgttttacaaatcactgtcttccactctttccacttccagcattttcttttgatgggttagaagattaaatagcaagttgtaattttaagttatggctctttgacagtggaaaatggattaaaaaaacacacaacaacctactaagtcttgtagtttcttccatgtggtcttttcttatctagagatagtaagtcaggcatctacaggaaaagaatccactctagtgaattcgtgcctgcctttgaactgtgaaaatcctttgcattgccccacatttctaaagacccatgaattgtgcrgtcagctagaaatatcctgtttcaaaattgagattacgtgacactgccctagaatgacacttgagctgaatgctcttgtccactgctgtagggtacacatgaaaccttttacttagaaatttaaggttcttcatgtggctggaaaaatgccacaacatgacttttatcaggctaaaatttactgtgtcatgaygaaaattgaataaagtaatcttgactcattttaatttatttcacctatgtctgactccagctttatcctaatatacaggacaaaagttatttccataggagcatctattatttgcctctatttctaaccctgtacaggtatgttagaaacactgaacataattttatatatgtctttgtctcatcaatacagtgcagttttattttttaactgaagaattcgtgttttgacatataaggggttaccagagctatccaattttattttatgaaacaaaattgtaattattcaaagtccaagacatgaacagaaaataaaaagtaatgtttaattcatgtaagaaagcataactgaagctcattagtcaaactaaaaagctcatgaaatttctcacctgaatctttcctcaccctgggcagagacttcctttcaatttgtgctcaattttaggcaacatttaaggatctgaataggcaaagagtgagagcaatgattgtaaatgtgttgttttaaaaggtttctccactaaattsgtatatgacaactgaaaaaaaccttgggacaatgtcattcagaccacaggaaagtgcttgaatatgttctctgatgctctttttagagcagctgatataaaaagcaaagaattttatgtccaaaagacttaggcaaaatatccgaacggaatgctgaatgcatggcttttcaatttatcacagtttatagacactttacatctatagtagtaatttaatttaatttcttagaattatggaaagaacaaatggtatcatttagtataaatggttctctgctcccctcacctccggagttttaaagatggtaaaactaggactcagagatgtgaagtggctcacccttgatcacacaaggagacagtgatatattttggttgagcccaagtctccttctgaatctagagctatagctgttaaactaaggtacttctcaatcatatccatggagcaaggatgtgagagtagttggcttttgtattatatgggataccactgcaaaaaagtaagcatgacagtttcaccttaggggtgaatttcatgctttgcaccagttcaatacaatgatgagagaatggctctcatggtactgaattggacactgtacaaattcatggtgttattcatattactggccataaaaagagcaagatcacatttatatatgttctggtgaaaattactctccagtgtttctgctgtcacctacccaaaccaagctgtatatttttttcttgagaattttgcatccatactgtttcttgtttggtttgcactgacraagaacattcttcctccacagcacagatctagttatttgcaaaagatatttttaaaattataagcaaatgttgatttagactccttacacattaattaagagaagcacttttgtggatgttctttggcttagttcaagactttgtcaatctgacttttcattaagactttatttattattttccccaaaaagtacttgttgctcagatttgaataagagtagtttacttgtctacagataaaaacaccttggctgtattcaaagagtaaaatatttaattcaaattttaggctatctgaattttatcctttctgcttagaaatgataaacaaatatttattcttttattgagcaacagctatattccagaaytgttttaaatgcttgagattggggaatagagataagtgatactagcttggtatgcacgtatatgggtgaccagggggattgttaggaagaggaagaaagagaactattacaaacacgcatttataaggcagcttttaatcatcaataaaatatggtaaaatatgttagtttattaattatttgattaaacacatacttttttgtatgtgaaatactcaagttaatttgtcttgtttatttggccttgcttgaatttactaagtaaacagaaatttctagccattctcaattcaaatgaccacaaattgagagaatcaggaacacttagatacttagccaacacttttcactaacttatttaggatatatgcctgagatcatgacaataataataatcatggtaaaagtagcaattattgttattttaatagtcataacagatgagtgttgccatggaggtcagtatcacaacacarccaagtccatctgcctcattttgatgttttagtggccacctaactgataccgtctggtgacactcaggtcagtgactcccgctttttctaagggatggcctcagtggtttggggaaggtgccaaggaaagctaactggggacttgctcctgataagtcagtgatcatggaccacaacaggtggccatgaccccaggggggctttgcacacttggaaaggtggagttgtgcaacattttgctgtctggctgccaccttcagtggcagatctattgccacttgggttgtctttctcataattatgttccgtatttctcaatatgacagaagtttgttaacctagttttagttctaactctgccatttactgctcatgtgacccttggcaatctgtttaaattttagcattttcatgtttttcccacctataaaattaatatacttttctcaggttagctgtgaaggttaaatgagatgatatatgtgaataggattttgtaaactttaacaacggctgacacttactcaatattggctatggttttatcagataggcatggattgagttatgcagcttctctgttctcaccttgtccttggtgcctggggaatgtctagtattcgtagtcagtgcagtcatcccagttcctgcaacgtggtactgataggaggaacaacaatcaacatttaagttttgtctaacttgcctaagtttcttccatttacagtaagtgatgagaaatggggtataagtgtgagatttatgtcactattcaagtggggatggttaagtcaattaatattaagtaatattatttaaattaattattgtctccttgactctaatgtaggaatacattatataaaaagtaaagattttgtcatctcatcatccacagtgttttgcatgtgctaggttcttagaaaatacttttttaatgattggcttttgtgtttacctcaagagtatagagagagactgaaaaatatgtaaaattatgataatcctgaagtttaaggttcatgaatcaaattttcctcttcaaacaggtgaataattttgaaatttattagtaaatatttaagttgactctttcccaaatactgcctaacttcttttcttctataattaagtcagataattttaggaaattggacaatttagtcatctttctatagcatgtacactacagatgactattaaattatgattccttcagaatctttattttacaagaatataattaagcttggctcagtggctcatgcctgtaatcccagcactttgggaagctgagcggggtggatcacttgagctcaggagtttgagaccagcctgagcaacatggggagatcctgtctctacaaaatatacaaaaaattagccaggcatggtggcacattcctgtagtcccagctacttgggaggctgagataggagaatcacttgaacctgggagacgaggttgcactgagctgagatcrtgccactgcactccagcctgggtgacagagccagaccctgtctcaaaaaaaaagaaaaaaattattcaatcatttatattttctggaattttttctaaaatttctcccagatactttaaaaatactcctgcaaacaatttccacttgcctagcaggccattcagaccacagaactaaaagcaaaatttatcagcctttccttccaatttgccatacccccacaaatcgcacttataaagtcaagagtaagcacatttctaacaaggaccaaaacttttttctcaccaatgrcactttcctatatcaagtgtacctaatcaggcctatcattaagaaacacaacctttgctgtcctctgctatatcacatcatcttttcaattcagattctatttacaaaaatcctctaaactcattggtttttctacaatggtttttgatcacattatrttactgacaaatgctatttttatctcctatatgggtgaatcatgcatattaactctttcctgggatgatggacataaaaaatctcctttagagatttaattacatttaaattattttcaagtcaagtagagtataaattcacattttacaacagcccatcatagaagtctcactggatttgttttctttccgctaatgtcccaggtcacctatctgaaataagctacttaaaaaggacagggtggggagatggcagagaactgtgctgcaggtttgggaagcaaagaaacaaataataatgtaaatgtcatctgtgatctaagattgctatcagtatcagatattttggcttttggtcctctagcctacctaacatagacttttttttttctattcaaaaaaatattacacttgtaggaaatgactagtgttgactttctcactctgagtccaattacgggttctttaaactgctcatcgctagtattatatgatggtcagctttaatgagtgctcagaagcactctcattatatacaaggcttttgaaataagctcctgtctcgatcaattgcttcaccttcttcagagcaattagcataagaataaaggaggttaaattggacttccgggctttggtgaaattaattaataccacttcaccggtaaggacaataagtagataaccattttcattactttatgtgaaagacagattatcacatgcacagcacccagactagtacaaaagtaacccatgctgaatgtgctatcttttaagtccatgtattatgaaagatttttttcctgtaattttaatagctcaaaaaaagttttaatttattggtgacttgagctgggtaaaggttggccattacatactggcaactgcttgggtaggatgtaagttgaaaaatataagaaaaagaatggcattaaaaaaaaagtagcctgactgggtgctgtgcacttgtagttccagctactcactaggaggctgaggtgggaggatcgcttgagtccaggagttcgagtccagcctggaaaatatagcaagacatcaccccaaaataaaataaaaggaaaaaggaaatatctgtactcagatataataagctatctattctagacaaatgactgattagtattttcatgctcattcttgtacataaaaggtaaagtgtcctataaccatcatattttttggaattccagagcataatgccagcgatttaactgtatggatagtagttaaatccttaacaatatatagtacatgttcattttctaaatagtagttttaatgttataaatgaaatgcagcttttgcaaattgaaaatcatgataatagaagtctgtaccctccctttatggcccattaactatctttgcatcataatatagttatctttctcaaaaaaattaagcatttagctctctcaaagatgctgtcacttttttaccctaatacgtaacaaagttgaatggactcctttcctccactgttgtataaatttaatctacattacaagataccacactactattcaagatctatttgagtgtttaggcatttcttaccaaaataatctgatacctactttttaaagaagtcaactggtcatgtcagtgaaaatggcttaattttggcatatagttagtaaaggctaaattgcaagtccaatctatttttctgatcttatgtgttcacctgaaagcaaaataatgagttcagatattcttgcatggaaacatactcattgtgatcagaatgaaggaagttattgctaatgcacttacaaatatgtttatccctgcgagctaatgtgtctcaattcctgaaagtcattattaccttgctcctttctagtattttaaaagatgaaaaagtgataaatttcaaaataataaaacatcattatttttgacattgaggatgtcattttgtaaattaacctatgacatttttactttttggttaatccttcagatttactcttcattgcttttaactatgaattaaagtaatgagttgaattaggtaaatgtctaacataattaccatgtcctcagtaaaagatgattgttaatgtgtctgatgatggctggttgactagaaattatcttcagttccacattttcaaaatgaatgcaccgtgggtggaatggaaaataataatttaaggcacattaaccattaatatagatctagggtgaccaattgcccctgtttgcccaggacagggaactttgggttttaaaactgataccaaggggtacctgggatgctgaatgttcagtgctaaaaccaggaaagtccaggcaagtgctgagtggatcaggctacatagattactgcacaattaattatagtaaattgattctgtatgcaacttaaataaacccagtttattgaggcatgatccagtttgcccgtgtgagaacctgatttctgtgaacrtggagatttagccataggtggctgaaggagagacataatatagatgatgatgttaatgatagcaatggtaaccatttattgatgacaggactggacttttttaagacttagccaaagataacattctctgaaatctttcttgatatccttaccctacccagaattttctgattcttcctttttactcccaatgtaacctgtgccgaagtttattataatgcccttaaacttccttattwgtttatttgtcttcctctgctagaatataagcttctttaggaggatagaggcattatgttatttatctttgtaccccaagcatccagtatatttagtgaatgaatgaatgacctaggtatttttttttactcttcaaagtaatacaataaaatacatgataccatcctgttttactgatgagaaacaagtatctaagatgttctgtaacaagcataagaatacgttaataaattatgaagccaaagatggaaaatcagatctgtctgattgcaaagccagttctctttccattactctgtattaaataatgctggccaaacatagtgacttggaggaccctctcctttcagtaagagagtaggaatcagatatacaaatgaagactatgtcagtcttattatggatactgatgaaagttttctggtaatctgcaaaatagattttatagataattgctgtggaaaagaagtgactaaatgtaaaatataatctctgctggtatgtttagaccaggmaatcaaaatgcatgacctagtcagacaaagcaaaaggttctttacgtgttcttcttgtatcatcagtgagcctttttcatttaagtacaatgaagtgtctctgccttaagaaattcttcagaggcagaaattcattattctttattaactcactgtgcccttctccttcttctgcaccttttcctgtgtattgtctcccattttaaaatgtattaactgagaactaaagatagcaaagtgttgtcaatattataaagtatagtaagacagcatagaactacatggagaatatattgatamcagcatcttttacacagtgatgaattaataattaaaccaaacaaaaccaaacaacaaaacagttttacagctacttgggaaatatctgtaaacaaagtttcmtaataattaactcttggaatatcgtcacttgtacaaatgctgcaattctagcaagtttgggacacttacaggaaactgtctgcaaataaacatgtataatgattttagtgtatatgacatgaaacagacggcgacccatttattaaggtccattacacagatataggagggactttaaaggcatcacaaaatacttgccaggaagtaaatgttgactatttccaaatctcagtgcaaaatgagatagataacgttaacatgcacatggagtaatacattctttaagtacctattcagtgaggacctgctatgtgcaaggcacgtattccagatatatattaatgaaaattgtgatcagttaaaaataaatgttactattttcattgatctcattttctattttcaataaatcaattacaggtaaaatgtgttatgagtgacaaaatgactggaaagtttttgccttaatcaaaatttgtgtaattattttttgtaggtaatcaggtgatttagaagcttaggaaattatgatgctatttttatagttattatgctattattatgatgaatcacccattcatgtgcattaagcagcattgattaatatttagattttcagcgttttaagtgtctgtaccttatttacatattattaaaaagtcaccttggttgtaatcatctgtcttcccatgatcacaatacaggtttgtggttttcaatatgtcatgactaagaagagattttatggtgcttaaatatgtagtaaattcattaaaccttagtcatgagtaaaatgatccctgtaataccactagttgcataatacctgcttctgatgcctgcttttaatttttctaaatacattggctggtttctagaagataaatgtaatattctacagagctatagactgttttgccacttggaatatctcgaacagttgtcatgggcaaggccgcaggtgctatatcccaagtgtatactgcttttatttttacatgtacaaaatattagaataataaatatatggtaaggcttctagaaatgaaaactgttgtcaatctgtaatttatagaaaatttatgtaagaaaacttatgttgtcttttaagcaattctcctgcataataacttagtttagagtaagaaatatgcatcttatctaaactgatttatagaccacatgctatttttacaaatatttaagaaaattcctagataaactttggaaccaaaaacaatgtagcctaataacaatgtcaactatacttacagtataattttatatataaccttttatctttataataataaatactatcacagccatttagagaaggcaattttagtttacctctattgcttaaaggctttagctattatttatgcacaacaagaattctgactttttaaaattagttttaaaattttggatcagctttataaagaaacacattgttgttaagtgcagacaaatgagaaccttgccatttctgcatttatgaccagaagccaacagagtcaattttcatgtttatttattctttgctttagaatgttatgtcagttgacagtattcagggcttgtgttgatgtaaattgccataaagcaaggaaacacgggctatagtactgtcagggaggctcagcactgcagaacaacacaatttaagaaaagcatttgcagaaagattcagtgtcagtcttcggaarttgactgtagatgcaaattggcatcaactacttcacaatctccctctaacaaaagagatggaaagggtggaatcaccaaacagagtgcacttttcggcatagtagctttcatgaagacaaaaataggatcccatttgttcattcacaatggatattcagactccacattctgccacccccatgttttattggagcctgcaattctgccaggagaagggttgcctcatgctaattcatcctaatgtttctcctccttcctacataggggaagtcttccaacccttcctactttttaagattagaagaaaagattcctcttaagccaaccatctctttggttacctttctgtaatgcctttatactgatgaaatgctgttatgttttacctaagttcggatattgtcattgtctcctgctgactcaacatgcattgtagccaggatcctggtctaaattcctgttatacaaaaccctgagctcttctaatttgcttcttgaaaaaaaaaaaaaaaaagaaaatctggccaggcacagtgggtcatgcctgtgatgccagcactctgggaggctgagatgggtggatcacttgaggccaggagttcaaaaccagcctggccaacatggtgaaaccccaccgctactataaatacaaaaaaactagccaggtatattggtgcacgtctgtgatcccagctactccgggaggcggaggttgcagtgagcagagatcatgacactgcactccagcctgaacaatacagcgagactttatctcaaagaaaaaaatagtcagctctagaattcttagggcatagaggcaatgttaacaaatcagaaggtacattaccattttaaaaaattttgtcaggcttatactcagatctctttaaacattacctacatttaaagaattattgtatgtaagagataaacacacaggaaaaaatatttgatttttgcttttgacctgtgtcattaaaataagatgattctccttatttctcaagaggcattccaattttaaatagagtggtagggaaaaaagtgattttagcagggatttacctgttcgtttgtactggtaagttatttttgtgttgataaattatttacactttaatggaattgaggtgtcatcatcttccatttatattattttgccttcctttttcacaaattttttactattaagaaagctacaagaggtgttatttgaggaaacagtcctataatatcattctttttttaaaattgacagtttcctcaaatatttatgggggaacctttctacttctcaaatttgaacagacaactttagtcaatgcttagcattgattttttgacaactcatgtccatttcaacattttattgtgagatagctaggaaattagttgtaagagcagaaaggtaattaggtaggtggtataaaatttttgacagttttgacactactgatattttcaggaaaaaaaacgcatacatatcctagtttagagtaagtctagctgaaaatttaaatatatttttaactgaacataatttttgagtttgagataattttagatatacatatagttgtaggaaataatacagagagaacccctgtaccctttgtccattttccccaatggtaacattctgcaaaaccatggaacagtatcacaagcaagatattgaccttgattcagtcaacatacggaatattttcatcagcgcaggaatgtgactattaaaaaaaatttaaatttttgaggattattctacctccaaattctttagtactaaatattcttacatctagacaaactaaaataggatttataggaaaaatgatttgactagagagtcaatatgcctgaattcatatctcagctctgccaccatcactggtttaattacatttggggagtcacagcgtggtggggcctcaatttattcttttggagggacttagtctaaatcagtgattgtcaactagaatgaaagtgagggaactcctcccttggagacttgtcagaatyttggaggagacgttttgcagacaaagcccaactmttttccytccacactcctacctccaccaccatcacaagcaaattctgatgtttgttcctagacttctaagattttgactccctcatcttccattgaggattgcttatggaaacaacgtaatagattcctagcaaatcttcatgtatagtgtgtcagcaactagtctcaagtgtctaacgttcttttcaactttaaaataataataagaaaaaatatctaccaagaacactaaaaatctttgtgcttcacaccatctagctgatgacgcataagagtagaggaaaatgtggtcaatacatgagccaaattcagagtggtgcatgcagaaggcttcctccaacagggatttgagagaaaggagatctgaggaaatccagttccactagggaatgatcccacagaaatggaatcttccagcttgagaacctgaagaaagtgactcacactacatgagaatttgaccctatctgatgctactttcaaacatatttgagtatttatagtttctaatttttggaatacgtagctttctctataattttgataccctatctccagaaaagatttattataaagttagagcacaaagaaagaaagatacagttgtgtttttatcattacaattgctgccttaagcatttctttctgtggtctagtctaagttattaaacctcattagttttttacttctggttagtgctgtctccttgattgtggcaaatgcaagttaccaatatgactctttgctacttctttccataagaagacaaaatatatggcaaaaagagaaaaaaactctaggattccaaattataagcactactcatattgaaagttagaaaaagaaaatgagcctgaactgaaaatcaaacaaaaagacgagaaaaggaaatggaaataaagtttccctgtatcccattagggttgatacattaaagaaagagtgaggatagctggaaataatattttccttcaaatgacagctaaatgagatctttggagctgtgccacaatgagtgaagtcagggagacagggccggtagtgacaggaggagaaaagtgcttcttcatgtgtcagccctgggtttaaaataactcagaaggtataaaagaaattccctcctcagatacaagattatttgtgggacacctgattaccatttaagagatatcaacagttaaaggaaggtgatttaaatctggatagctcccttttaaatccagccctctgattctataaggcaaatgacaaggctgtctagacatggagtacattgagcaaggtttagatgagggagccccggagactgtgagacagacctgttctgtgcctgagaatgtcagtgatgactcacaggaggtggagaaaagtgtgctcaatgtatgggccasgctcagggagctccttgaagacagatcatttggtattaatgatacagcgataccacaaagcacaggaggtgtagcctgctagcattgaagttaggaactgatttgaattaacccagtgtttgaatctggatgcaagagcctgtatggtatcttgcatgctaacttcttcataatcttgttcctgaatgggtgccagattgaggagtctttgggatagttgatatttcttttaaaaagcctgatctatataaagctgtatcaaccacgtgcaaccactttagcataccactctatattaatagaatagaaaagataattagcagagaaaaagagccaaggaaagctaccaagaattagtgaaatataaaatgtgttcttattatcccttcctcaataaaggggcaaacaaggttgttctggtatcatctgtgggaattttacacaaactattttaggaggaaggtgggtgactagatgatggatggatggatagctgatggatggatggtggctgaagtgggtatgtgcattgaaagaaactgcaacagagcactatcttctgaagtcacttgaagttatcccaaaggtcaggggaagaaaagggaaaaccagaaaccacatatgaaattagcaaagctgagcccgagtctgaacgcactgtgaggaggaagcaccattagggaggtgatccattgccagtggaaagccagaagctcagaaccattagctgagaccgtgctcctcccaggcagggaccctctagttgcctggggagatgatctgaattcacataggaatggtcgttgcctcttccatgaggatcatgagaacatcactaggtccaaaccacaagctgttcttgtaaaagatagagtaaatggttacatcaaatataatcataactgtagtcaacctgcagctcagagatatgtaagagtacaagtaaagctctttatccacgtgctgaacatttttattaaaatgtgtgaatgaaaaactattttaaaaaatagaccaggcatgatggctgatgcctataatcccagcattttcagaggccaaggtgggaagactgcttgagatcaggagttcaaatccacccccatgagctagtcacctcccaccaggtcccacctccaacaatggggattacaattcaacatgagatttgggtatggacaaatatccaaactatatcaggtggttactgtagagaaggggagaaatgaactcccttaacgttccagctagatcttacagaagaaaataggaattagttttgatggtatacagaaaggaaaaccatgtgaaaacaaggcataaggctaccaatatgtttaatgagaataaaaggaagaaagaataagtgactaacatacgtacgaaacatgcagctcttagatccatgttccttcagtgctctttatacttttcatggcttttcccacgtaagccgctcaactcacctaaacttctgtgccccataaccagtttccattaattgacattataaccatctttcaaagcatggagcagatacggccctttttcccagctacgaggatttgtcaaaagcagctttttaaaatggttatcttcgaatgtgcctaatttttcttatcacactgtaaactttttaagtcaaaaatcttatgatcaaatcatcattaccatttattacttttcatcttcacctgtctgcctcccctctgctcaaccccagcccctcatgcagtacgtgcacaataaatatttgttgaattatgaatgaatacctaatattgacatgcaaggagtttcatgcctcagttaaaactcccagaaaatctttttccagtccccagttagagccagtgtaataacagtgactttttttcaacaattacttaaataacattattaaagcaattgttgctttaggttgttcattaataaaaataaatgtatattttctttactgttagaacagtttgattctgtatgaattcctattcctgattttattatactcctgaaaccacagcttgctgctggttcatctattaggcatttgaaatgttgaattactttgaattgcatttgttcttatattgcctaggctctggttggcctcctagggtcgtcacaccataatcttaaacacaacatgtgccttgtggcccagatgttttccaagagggagtgctgcagccaagaaaagcaagatagtatcttgaatacccaaaggggttgatatgactaaaaagcaaccgtacagccaactgtagagctgtccaagaaaaagtgagcctattatttgtatagtttaggtttttgtgatcaaatagtaaaatttgcaaaagtttcatgataagatcttttgcttcacagattctcgtaatatctgcttttgtagtgtggactccagtgttcagcagtttgtagataaaactgggatcgtggcaacaataagagaaatcaaaaaaaaaaaaaggaagagttcatggactcttgtttcttcataaatgtgacatgataaaaattacctttctttcttaatatttgaaaataacataaagaatgaacaaagattgcttctagaactaaacttggattgaggcaacttaataaacggctgtttgttgttgtttctgttcttttcttctgacaatatttaccttttatattcttgtggagagctgagatacctgcaattgtgcttttaaaaaattgttctgtcttcttgcagtgaggtctcttttttggcttacttattaacaaagaagcaaattacatatatacatatactttatgtaacatgtatacacatatgtatatgtaacaatgtaatgctatgtgtatacatatatgtatgtgtaatatacatatacatatttatacatatgaaatataaatatctatatttttatttcatttacctactagctgattcacatcgttttcataaccaaaatatagctcatggcttgagtatgaaaccctgaccaaagtatggaatttcacatacatgtcatgataatgtcctagtcagattcagtcctacctcttgcttctgaaaatgtgctagcttctgttctaatcctaattgcatgaattagttcattgtccagtttagaaragaggaacgagtaggaagctgctttggttctggggtcaatctaggacttcaggtctattttagggaaagcattctagaatgtccttgcccttcctgatacactttgatataccttcaactttgagatcattgacttagtgttatcttgaatgagggggtccaatasagccagctactccatgctgatttagatctcaatgcttttgaaattcaagtttttaaagcacttgactctctgttttctccaaatgaaatcctattttgtatttaaaacagtaagaccagatttccccttttgaagtaattataggatcccaagaacccttaattccactggtcccatggtctacttatccccccgccccccacagcaagtcccttacccctgaggcagcttcagcgactcctccactcacccagcactgtaggaaaatgtctgctgtgctccagccagagcagacctactgtattgcaaatttatcgtggctggaccatcctccagagatgtatgccataaggacaatggaggcctcagctaagtacctcctgctgcattcattcccagggtagtaggtggtatagctgcaagacacggaacccagtattaggccttgctccattttctytaggcttcaaagctctgagccagtgatagtttataaaagcccaggactccaaagaattaaaatcagcacctgtagatctcctggtgaagataaactccatgggcatgtaaagaaagcaataaagatacacacatagtttttttttttcttttgaatatcaacagtaaccttgagcagagtgactctttatcagggctcttggtacttaggctgagctggtgatcacaaaggaaagaattagaaatttaaggtgattttattttattttatatttttagtaggagtatctggctgctatctaaggaatctcttctattagttacatggaaacttggagattttattgtttccctctcagtgtgtgtgtgtgtgtgtgtgtgtgtgtgtgtgtgtgtgtgttagccatttattaatcctaactcccccaagaaaagacaatctataaatttcattttcactcacattaaaaggtgagatgcaggctgggtgctgtggatcacacctgtaaacctagcactttgtgttgacttagtgttatcttgaatgagggtggacagatcatgaggtcaggagttcgagaccagcctggccaaatggtgaaaccctgtctctagtgaaaatacaaaaaattagctggacatggtggcgggcgcctgtgatcccagctacttgggaggcaggagaatctcttgaaccaggaatgggaggttgcagtgagccgagattctgccactgcactccagcctgggcaacagtgccagactccgtctcaaaaaacaaaacaaacaaacaaaaataggtgagatgccaattctcttcctgactctgcactccagtgcagtgctccatttcccctattgataataccaccccaaacatacctatttttccaggaccacatttcttcaaattgcactagtcatgctgttaagaaacacagaatctaaaaatgatctgagaaaaagagaattgcaattacaaccacaaaattttctatatactagtgaatggataaagatatttattgtgacacattgagcaatttttttgaaagttcatgtactcttgctcaactgattgaaactttgggaaaatgtaactttttgagttgtaagatcatgtaaaagttaaatgaaggaagaacagcaaagaagttatgggaattgttgttgtgattaagtagttaaatttgtatatttttttcctgctgattagggagttgttactgaaatacgttagcaggatccttcttttagcttttcacatgaatatttgggttgctttctgccttgataattaaaagagaattgtgtatatcttgttttccctaaagaaaggtgatactgactttatcatgtcatcataatcttcacagctagtagtgaaatacctttattgaacatccaccatatatataagactgttctaatctaaactcaataaacctttaaggtctatttcttattcttcttactttatttccataacttaattagccttcaaagcccaattctaatatgcataatgacttgaagtattttccaaatacaatcagtgatttttttgtgtgtgctaagtgttctcaggacagggtcaaaactacctattacatacattcaccatgagaatttagcacagttggcctctggcaacagactcaaagatttattctgtgtagctattttctagcctgctggattccagccagttgcctaatggatcatgagtgagtcagtttcattcagtctcttagcaaagtcaatttgtccagcagcacacaattttctgtcatgtagggtctttgcctggcattgctgtgacaaacacaatctaactgttttgcttccctagattccaactgagctttggccctggaaggctggcttagataatcaaagtcccctctaaggagggaaagatggtataatgaaggcttcctggaaaaattagaccctacaatttacccatctccaaaagtgggtcatggaacaaaaatatccatgtattaagttagattaatatttgtgtgtgcaatgaacaacagcatttgccttttgattacttcgggcccaaatgagctttctcttttaagtagcagaaaaataacaaaagcagagtacacctggaagggacagaatagtcacaggccagtgttgtaagagtcagtgtggcacttctgaaggaaatctgccgagtgcatgggatactagagcaccatgatgggcaggaggagaaacaccctctttctctaccttccttctctaccgccactccttcgagatggccaagtatggaatttctctgtcaggggtcctgccacctgacatgtgcaggtccagttaggtagttgaaaaggacacattactacacttatcagggttctcactacaaacaaattttcatagtccttctggaaataagccacatcaccgaatgcctttccggtagctgacatgattgattgtggacaacgaagaagtcacttattcctaaggaaragactggagtgagggttgctgtttgcacatacataaaatcctagaagagataccaaagctacattatgcagaaagattattattttagccagtggctctgaggacaacctcatttgtcttctctatgggtcactctttttttttttttttttcttttgagacagagtctcgctctgtcacccaggctggagtgcagtggcacaatctcggcgcactgcaacctccgccttctgggttcacgccattctcctgcgtcagcctcccaagtagctgggactacaggtgcctgccaccacactggctaattttttctatttttagtacagatgaggtttcacatgttagccaggatggtcttgatctcctgaccttgtgatccgcccacctcggcctcccaaagtgctgggattacaggcgtgagccaccacaccyggccaggtcactcattttttaagtgaatattttcatttccaaaaaaaaaaaaaaaagcctcatgtttccaaagtggcataaaaggccctggcatgtagagtgtagaacagaggctcctcctttttagccagtctctatttcagaaatcattagatagaacatacttggtctgaaaaaaaactatgaaattttgatcccccttggagaaaatgtactttaatgtgtatattagttttcatttccttcctctgatacagtaaagtcaaaattttgcgaaccattgtgaaataaggagatatgaccccataaacacaaacaattttcgttcccttgttcctacatatgtttgttaggagtacataaaagacaagttagctctatagaccctctaattttgagaaagagaagcacagcattttcctctttgattctgttttgaaagagtgcacataatgatgcatacctcatgcttgtctgccttcccctggactttaatttcttcctgtccagccaaaggagaaggtttttggcttggtttcagctgtgcttccatagctgctacacatcaaacctatcctaccaggtagagactagtgtattcttttcactgagggtagatggtcttctaactttaatcttccattctgcctgtcacgtctagaatctatctggttaaaactcacgttttaaaaatgcatgtcctaaattgtatccaacacttgttagtatcaattattatcataatttaaagcctagattgcagatgttcatcgtaatactttgccaatattcttatgactgtttcttttttcccatagataagtgttccaatttaagtgtgttttcctttccagaatgttctgtatgtaactcttctgacatttcagagattgtgttattactaatatttagtctcgtgaggtgcttcattttttaaagtattctttattgtgttttttcttcatgacccatcatggtgctcgatcagttccttgttttttcttttgagcatgactaataataataaagtctgagctctggtctcatatcacatattttaattgtataaaacaactatgaagacccacactgacaagatcctgagcctaaataaaattaggtcatgtctaaaagatattgtcctttgaattaagcagaaygtgtgggtgtgtgcacatgtgtgagagagagggagagtttgctcacacacagccttgacactgataatattttcccagacagcttctactcagtgactttgtagtaaaatcaaaggagctttagtgtgtactcattttacagattagaatagtagagcccagagagagtaagttatttgcctgaaatcccacagcgagggtccacgggagctaggactctggctttcaggaccctccttgttcagtcctctttactttgagtcaactctgacgggacctggcatggtgccctgcaattactgatgatgcgaaaggtgagagcggatgaaattttagcacactgatcaatcttgagatactaaaatataccagcaaagttgtgaactcgaaaattactaaacaggctgggcatggtggctcatgcctgtaatctcagcactttgggaggtcgaggaatgagattgcttgagcccaggagtttgagatcatcctaggcaacaagaacaacaacaaaaaacaattagttgggsatggtggcgcatatctgtaatcccagctactgaggaggctgaggcagaagaatcgcttgkacctgggagttcaaggctgcagtgagctatgatggtgccactgcactccagcatgggtgacagagtgagaccctctctcagaaaaaagaaggaaagaaagagagagagggtgagagagagagagaggaaggaaggaaggagaaaagaaaagaaaagaaaaaaagaaaaagactgaacaaaacttgagaaaagcaatgtacccttatcacagttttatgggaaagtacacaaatgagtaaaatgcaaaataatggcattttctgtactgagaacagagataccacagagcaatcgaggaagaattagttatactgttctctgttggattacaaagcagaattctgaaaagcacacgttgtttgacacgcagtgtgaagttgcttgacgttcactgtgatgttggctgggacactgtgccgggtatgtgtgggtctacagattcatcaaatggcacatggtcagaacgaccttctttttgctaatgtcattaagtgccatctattaaaaatcaggtgcttacaaatgagagtatttaaagaatcagagggagcaaggtattatgtgtccccttgttatcaaactatattatccaaataaggatatgatataatcaagccaattctaaacagtccaaaggcaaaacaaaagaatgtgcccagtgctttcagccagtgtctggatgctaaaaatcagactgactagtcaatgaaagcgaccacaaaattagatgattttgacccaaaagaatgccttggcctcccttcccagagtgtttgccagttttccatgtctgctcttcccctcttcacccccagccccaggtggaaatgaagatggttttccattttgttttgaagagagagcttcatgtcactgatctataatgtgaaggaaaatatcttcatcaaaaccaacattcttaggaatacatagaaaataaaaagactactcatgtcttagaaaagttttcccaaaagttggatcatgtkggataatgttatgatccttttcactttcaaagttccctagttcccttagagaggggaaaattatattactggtagaaatcaacatttccttttctttagtgaaaaaaataacacagcactctttaattgaaacctgtgtatctttgccctccccactttctgcctttgctttttcattcacatttaactcctgcagcaacaataacctctgggctgttctgcattagagagaactcaagagccctggaaattataatttcagaagtattgataatattaaacaacatcaaaaatttttaccacttttgcctgcccttcttacttttttcacaagttaattgaagatggaaggcagtaaagcctcgtgattctttttcaaaaaggttaaaawacaatataatcyatcttttttttttttttttttttttgacacagagtcgtgctcttgttgcccaggctggagtgcaatggcgcaatcttgactcaytacaacctccgcctcccaggctcaagcaattctcctgcctcagcctccaagtagctgggattacaggcgtgcgccaccgcacccagctaagttttgtgtttttagtagagacggggttttaccctgttgccaaggctgatctcaaaactyttgacatcaggtgatccacccacctcgacttcccaaagtgctgggattacaggcgtgagccaccgcgcctggccaaagtaatctatctttaaagatggtctgctatccttaattgtgtatttggtataggttaatagagtgaaagtcctgtaagctataggattagatggacgttgcctgcaattcaattccatctgtagagcagatttcattgtcacattaaacattagaacttaagaaacaagttcttcagagaagtggattgagaaagattgaagtagtattgtgtgagctgagcttgagtcagctattctgttggagaatccctaggttacatcagagaagatagccgtgggctagtcacctctatgagctttgtcatggctataattttcatcaccagtcagtccttcaaatagatatttcttagagatgcatgggtaattagagaaactctcaattcagttattaaatttttcctactcatatccagagttaactgctcatttttagcttgaacaaattagaggattgcttagtgctgaatactwgtctctttgttctataagcttgacagagctttcttattgcctatatgataatgttggaccatcttcaagtgtctacagtctttcctggggctggtatggtgctccagcataaatgcataaatgtgtaatgcagtggaatttcaactcagtgataaaattctctaaaagagagaactaattaattttagagccagaaagaggcctatatccaacctatttatgtatgtgctagagctggttastacagagcaaattagagaccaataaaaagacatggtgatcacttcaaattgaactgtcttaacagaaataaattgcagaagcagataagattttcacaaatcagtgcagtatggccctgttactttttatagcatctggattatggcttagacttattaagaattagaaaaacaaatttcagtgccatcactgatacctcaatataatatgggacaagctgttagacatcaatatgctgaaaaatggccaggcatggtggttcacgcctgtaatcccagcactttgggaggccaaggcaggcagatcacgaggtcaagagatcgtgaccatcctggccaacatggtgaaatctcatctctactaaaaatacaaaaattagctgagcatggtggcacatgcctgtagtcccagctactcgggaggctgaggcaggagaatcacttgaacccaggaggcagaggttgcagtgagccgagattgcaccamtgccctccagcctgatgacagcgagactccatctcaaaaaaaaaaaaaatatatgaaaaggtaacagcaattttcagtgagtaagcatataagtaaaggataaggagagaattgcctcttttctgtcgcattcaaggaacagctggaaaatggaagaaacatagaaggagagaaacatcaagaaatacgtattagtcattccactgtaggaaaagttcattacaggagagtcatgcaggcagacagggtcttcttagtatcaaggactgattttgataatgtgcccacatttcagcgagggcgttttaagacataagcacagcattaaggtgtttcaatagcagacatacctgtctttattgcagtggggagaaagcccaggctcatgaaagaggcgtgagcattcacgggaaggaagaaagaccaaataaaggcctaggaggaggtgagccggggaactgtacaagggagcaaaggccccttcttcagatgagttcaggatggccttagcaccagtgcttggggaagaatggctcacatcctctatggcttaccctcttcttccaaggctaattttggaggctttctagtctttcttttgggatcaaatatatcatgaaattgaaacaataaaaccaccccccatagagctgttacttggttttcacttttcatataatattaaaatctcaggactaggagcgatttccagaagctattaagtctaaccactacctccagacagaacttcacctagatagactaagggaatgtattccttattgaaaatatattccacctcattcatttacaaataaggtgtaaaccttcctggaaaaaaattcacaagtgccattataaatgcttctatggataaagaccttaaagctaacccaaagttattttgccacatatacttaggtgtcttaaataaataatatgcattctctcgattccatccttgtgaatttgcatttgggttcccacttcttcaaaagagagtgtgtttgttccatggccaattagtttgatagtacatataagtaattttgcatggataaaaactaaccatgcaactttaactctgcctttaattaagtaatcattaaaaatgaaacttgtctacttcctcctgttctgtagttgacggtgattgaggggcttggtatggctgtagtggcacaaaaatggaaatcagtaaattagagcagttgtcagacccagattctgattagctaaacagcttgcctgggttagtgattaatgcagttgtagggaatgaaatctgctttcctagaaaagtcaatagagaacgtttaatgaagtagaattatgtgacagttgtccagttgtgtgaaccatctttgaacttagtcaaatgcagatgtaattttatattaagactttaaaagaatggaaaaatggcttcaaacataggagaacaaaattttctgctttctttgtttacttcttattttatgtcaccccataaatgtgattggtacggcttttgagattattggtttagaatttcttaccctttgttgtcytgagccatcttttctctagaaacatgctaatattacagatggttcaaatgttcctataatgtcaatgtgtaaatccatattgagcaatgtagaggtccggctgtgaataggacaaagaaaaaattaagaaaatatttaaatgtacatacctccttttctaggatttaataactcgaattatttataaaatgttattgacaactttattaaaagtataagttacacgttataagattcacacttcaaagtgtacgattcagtgtttttagtaaagtcacaatgttgtacaactcattaccactatctaactccaggatattttcctcattccaaaaacaaacctcatacccattagcagaccccctcccatttcctctttccaccctttccccagctattcaagttattttttaagcagatgttctgattaaaactctgtatctgtctttggtgctttagctagcaaaaaaataatgaatataaaacaattgcctccccatatatattggtatatataatttattagaatgtttttcttttcacttttaatgaaataataatgaaatttcaatatgtataactggtgaaataatttyggcaatactgtgagtgaaatgatagggcaaaaatgaatgcttttatttaactcacaattgatataaacaaaaaaatcaaatgatccagtcaggtcgagggtaaattctcttaaggaaataacaggtaaatacttttccttgagtgtaaagacacttatgtgtatttattaacacatacatagaatttagataagaattatctttaaaaatatgcatccttttaaatttattcaactagtattatcttttcactacaaacacaataaatcctggttttgcttgcctccactagtcgatatcttgagttaatcttgcacatcagctgaaagaatagagttaaagtttgtatctatgaatagaaggacttgataaactatttgataatgtaaataagagtagaaagggaatatgtagtgtattatgctaagatagtatatgtaattcatgtgagtgagcacactgatacattttaagataagcaagtgccagattaatgcatattcttgccctgattccttttcatcccctttcccttcatttcctcccctttcccatcctcttccctttagacccttgtcacactgacctgcattcacttactggaactggctatgtcccctcctgcctctgggtcttcaagcaaggcctctcctctgcatgtcttaacccaatccgcacacctcccacaccatgctggccctttgcttacttaaattaacttatcatccttcaaatttcaactcagtagtacttcccctagaagccttttggaactttccagaagtcgggtcctgttcatgttctcagagcaccctgattttttggaagtaacattcatgcttctatcctcatcttctctattttcaaagaagaatcaaagaatgtatgtatattctaatatatattgtgtaagtatactaatgattcaatatctttttagaaaatctgcaattttggactttttagtaagtcagacatcttttgcttctgagaaatctgaactattttattttgttatgactgtgacattcattccatgtgttgaaatcaagacacaagaatgcaagaaatgacgacttgccagtaaatgcccagttttcactattaaaaaaagcctggcattgctctcccagaagaataacaactcagtgatagaggggcgtaaagaccatggggccagcatatttgaaggtgatttttaaatattaactgttgtggtcttcaatgtgagtaagcctgcatttttcaaaaggtttcatatcttacaaactcctgatttctccctttattaaaatctattttgaagtaggccaagctgtcaactaaagtgaatgttttcaactaaaagatgattcactttctaacttgacaaaaataaatggagaaaattatagattatagatcaattatcactttctaatttatctctatgatttcaccctgatttattccatgaacaatttaaggtattttaactatctgacattcatttagttgaacaaaaagaaaacgtgaaaccttggtaaataagggacccccttaaactgaaactttcctaagtacatttgaaagtccataaactgacaatggataccaagatcatgagatcacaaatgtgacttttccttaagatttcatcacaagataaatcaaagtgctaggaattgtattttcccttttcctagtaatcaagtatccttctcagatgactctttttgtaaaagtaacaacttctcatctttgagacttgactcacataccaaatatcaaaaatggaaaatctttgaattctttktcctgttgtgggaatacgagtcatttataacaacaaaaaaaatcgataggaaatggatgttttagggaagtgtatcctgagtgctgtctttaaggcattgattggagactgcccacatctaaaaaatgactctaggacatcactctcatgtatttccgtgaaaaagctggtggaaaaatgtgttttcttctaaaaggctatgtgtgggacgtgtgtcagtgttcacatgtgcctaataggcatacgtaaaatcacacttgtatgaaaatcaagtaaatctgctgaaataaacagcaacccatgtttggggcatttgtrttggtagagattggcttttaaaggagaatggattaatatatgattctcttgtcggtattactatgaattgttcttttttgaggaggagtctcgccttgtggcccaggctggagtgcagtggtgcagtcttggctaactaccacctcctcctcctgggttcaagcgattctcctgcctcagcctgctgwgtagctgggattacaggcacatacaatccacacccggttaacttttgtatttttagtagagaagggtttcgctctgttggccaggctggtctctaattcctgacctgatctgccttcctcggcctcccaaagtgctgggattacaggtgtgagccaccatgccaggcctgaattttcacttgcaaaattatcagtcagttcttaaaacttgaggaagggaggagtcaagaaaatgaggtgaatgagaaggctgtttagactgtttttattgtcttacagtcccatttttgtctttcactcttccttctctctaatggctgggttttcaacaataatacaggcaagcataaaagttagcaaatgagggctaacctagaattgcaaatttgattgggtttcatgttggttttccttaaataaatcaacagttttaacagggtggcatttaattatatttgtttacagaaatatttttatatttgaatttctttcataacagtgtttattgtggtcaaaggatgggagggatgaggaaataatatttgaagaccacaggggcattcctcacctctgtagtcttattatctggccttgaaacactacgacattctttaactgaatttattaggggctraataccaacaacataagtcagaaaagggtttacattgacccctttggattctaaatattgtaataaatattattagttccgaaatatcatatctgtttgatttcccaaatgattgcagaaawgcttygatctttttagtcctatratattgtagagatatctcactaaygatgttttttttttttttktaagatrgagtctcgctgtgtcgctcaggctrgagtgcartgagccatgtttrtgccactgcactgtagcctgggtgacagagcgagaccctgtctacaaaaaaaaaagaaaagaaaagaaaagaaaaaaagaaatgtaattcactttcttctggtcagcagctgacaggatagaacacattggactagaaacctgttgtattcttacttttacccatgacatggcttcttttagaatacaaactgtttagaactaagacaggaaaatttaacaaagcattagatataaaaatgttcacaacatgtatggtctattctttaatttgagaatattttaagaaaatttgtggttgaaagctattgctgtcattgaggtggtgttacaacacaatcgatctttgaaaaagtattggcttcaccagggaaacactagacctctaccccagtgactcctgctaaagaggtctttgccatcgctgccctttctgatacctttgtgtgtgctcagattggcacactgattaatttcagataccatcagcaaaaatggaatatgctgaacaagcacttacaaagtagtggttcttcatagaacagagttgtagcccttcagtaacaaagaatgagtcagaggaaatgagttaatttaacaaattgctagttgcctaccagatatcatagcaaggaatgatatatgcaaggtgtgttaaaggcaatgtttccttaatttcttctttctatctcccatctcccaatgtcctctggggaggccgtagaggtgggagggacatattwagtaaaaagtgtgaccacttgctgagtaatttttagtgatttgttgagctggattaagtgaatttagagttgaatcttcaaaatgatcatttcctttttttaagagtttatattctggatattttcatttgaagagcagtgatagtatccggctaaggtttactaaattgttcaagtgagtttgcagaagactaagtgaaacaacttctgtataatgaactggaagattaatctgcatatcacataagcaaataaaaaacaagcaatcatatattttataatggaacaaccgtaagataaacaaacaaaaggcatagttaaaaatctgtatgaaaaagcaaattcttggtttcccaagaatccttggtttcccaaggctcaagaattttatgatttgagaaaaatacttaagtgttgcctgcacttctgtgcaataaatctcattatttcatactttattgccactactgtcatgaaattaatggatcacatttaagtattccttcttggaaaaatatcactaaaatgtaatgttcctcaagtcatagtgcaaacaaaattatatttatcatttacagacaggttttattggtcctggtgcattcatctgctgatggccaataaaagctatacaaagtctcatcaatgaaattagtaatctgtggggacaaacatgccattagtgcctgtcattygagatttgtgatcattgacgtgctttttatggcatctgaaaatattagtttgactttaaaaaatgtagagttgtttctattgttggatatatttataaaattctgaacataaaaatgctctttggtagccacttgaatttttaaaactatatttaataaaatacagcttttaggaatagcaatcagcatgggataggtgacaatgaattttttttttttttttttgagacggagtctcgctgtgtcgcccaggctggagtgcagtggcgagatctcgctcactgcaagctccacctcccgggttcacacctttctcctgcctcagcctcccgaatagctgggamtacaggctccagccaccacacccgggtaattttttgtatttttagtagagatggggtttcaccatgttagccaggatggtcttgatctcctgaccttgtgatctgcccgcctcggcctcccaaagtgctgagattacaggcgtgagccaccgcgcccggccaagtgacaatgtattttaagtagcctctgctatccttgacgaaatgtgctaaagtggcaaaatgtttgctttagagatgtacaaaagtagaaaatttgtgaaggacattaggtgtttctccactttgagaggggatctcctcttgatctactctttatttcccatcccagagtgaacaaggtactagttgatgaattcgaatcaggatacttgaaattaagacttagatgtagcactttgtgatctgtaaaaatcatatcagatcttaaatatgaaaatgtttgagtttagccaaaatcaccagcatcattggtgtatatcaagtttaatcctatccttggaataatagaacttcaaggttggaagatgaatcttgaatagtttgaagttaaaccctacctgccgttgcaatgagtcccattgaaaaacatttcctacatgtcctcgacaagtctttgctttctttagttacaaggaattgcccaacctaccaaggcttccccattttatctttgactatttctataaatttctttttaaaaattgtggccatattttaagacacagagggagggtagacacctagatctaaaggatattaatctacttaagaggaatttgcttatggaaagatgatctagcaaatgagataaactggactgataaaaattatccaaactcaggtttagatgcctatagcagtttcacaaaaactaaatctttgtctctaatggatctgagctgatagcagtgtagtagagaccaaaggtctgtgactgtcgtggagaagccccttttggatgaagctttacggaggattttcaaatgttaattatatttacaaacagatcagatgtaggcatagatatattagaatactttatatcttctctcatttatttttctactgctagataaatgggacttataagtagctgagtaggcaaacaagaaagaatgcatacagttttatcartttatctgagattttgtgataagctacagaccaagtcaaatggactagttttggcaggggcttgctgtccatatgatggtcagttagcttttttctgagttaaacttgaaaactaagaactttaagaagtgcatgggtatatataggtgtgtgtgtgtgtgtgtgtttgtgtgtmattttacaagactgtagaattataaaatgacatttgttttaaggaatatttgattgacagtttcacttaccaacgttagcctctaattatgacactgaggatacccaaatttaaaaatttcctttataatggtccctgagacctggtgattgaggtcataaaaaaggaatggtagttttctttcagaattttaaattttctcaaataatatttcaccaaatattagccacacttgtatactttgactctgttggtcgttaaaatgtatagtcataattamtcctatggaatagggatttcaatagaaagaaagctttagaaatgaatcttctttgcagataaatgctatttaattttcagagttaatataattcaaattatttagaagtttacaagattctattataaagccagtttatttatttttttaattccattatcatctgaatattctaaaaaatgtaaaaagaaatctatttgtagagaaaacaatgccttttaaagaaaaatgtattttgtgctgggctgcagtcttattcatcacttgataaatgatgcttttaattcagataattagagtaatttgtaacaaattattagatatagcagacttgccattccatttctataaaataaaaatacattgtaatgtttacattgatgagtaataataacaacaccttagtagttgtaacaatatatgacctaaaatcagtggtaataatgtcctatgataagaagattgtacaaacttaaaagctagattttctttcaaatcttttgtcatactcctgagagaaagatatgaggggaaaaaagtcactatagcaaaatgccttctcagaactgtttcagagcaattgaggggagaaggaaagaatcagtcagagattgtttcaaatttaatatgaaataaactgttacctttaactattcagcaatgacacagttatatttcattccaaaggtgtttacaatcatatgagtgggtttctgtattcaatgttacaataagtcaacttggaatttcccattaaatatgatattaataaaagatttaggtacagtcccctggtgtgtttgaagctgtgcactctgcaaacacataaataaaaatatatctaattggtttgtggcattttgagattttttttttcagaaggaatgtacttaaaaaaattaaattactgcagttttctttcagaaaattgggcttttgtattaaataatgctagtccaaacttaaaaataagaatatttaagcctggtaagcatctttgttctctcaataaaaagaaaaaaattagagactctctttctccctggcctcatacccccatcatcttctgaagttatatgtatatgaagtattttttttaatctacagggataccttttaaataaaatattcctttattatcataaataatctgtaaaacaaaataatagtggcagtatttgtaataaagtcctaaaagttaaatcatccttattatacttaacataatccaaaagactcctaattaagttttcctttcctaacttatattatcttatgatgatctacaataattttgatgatgttctcaaatgttcttatatctgcttctgaaatagttaaacagattattgaaaaagacctctgaaacaaagcaaataaaataatgcatagaaggaaacagcttttagtcttatctctaatggaatcatgttattgagttttctaaattatggaagatgtcaaaggtcatttagagctagacttcatgtgaagaattcttaacttgaattggcttcagaaaaagaggtccatgaaactccaaaattgtatgcttggtttttatttgtacatgtaaacaaaaattgatagctttccccaaattctgaaaggagtccttagctctcaaaatactgagaacctccattgaataagacatttgagtagggactttgtggtcagagatctgagtttgaatcccagctctgctattttccacctgtagggtcttggcaaactcctaatctgtctgagatattgtttactttctaataagtgcaggtaaataatacagaatttacaggttattgtgagagcctatgagatcatgtgtatttttgccctggcatgttgaagtcacacaataattctttcctttctctcggtttctctcttttaagatgacaggaatggttagctaaagcaactgagtgttaacatgagggttcctgctctattgcttgttatcacacatgggtacatataacagtgactgcctataggaagaagtcattaccccgggacagctttcactggtggatttttatgatggaaagcaaccgcattaactgcaatatggcccagggtgacacttgacatctgtatgttttatttttattaaaaaagtaatttaaattattgccttttctttttattatggaagaaaatgtaagaatgttgactgttcactaagccgaagattccctttttgctttcaaagcttttctcaaggacattaaacactcttcctaattactttttattgatttcttgacatttctactcaacattgactgcttatttttaggaaacaaagaagcctaagtgaaaaatgttaatggtgcatttgaaactacaaarttcaatattttagtcacgcctcttatatgtaattgtaggtaaaaactatataatatttttgccatgtgcctcagctctcttatcaccgaagtaaatagaaaattctgtgattctcagatttcttccatagctttaacttattttgaacaaatctgtgacttaccttgctatatttcaaattttattttattattattcatttttatttttatttttttgaaacagggcctcactccattgccccagctggagtacagtggcatgaactacagcctcaatttcctgggctcaaatgatcctcccacctcagcctctcaagtggctgggamtatgggcccataccaccatgcccggctaatttttaaattgttttatttgtagagatggggtctggtactactatgttgcccaggctggtctcgaactcctaggctcaagcaatcctcctgcctcagcctcccaaagtgctgggataataggtgtgagccaatgagcctggcatattttattatatatatattttttgtctcaagaggttctgagaacatgtgtgcctgtatttcaaattttaaatgagtgaagataaggcttggcatagtcaattgaataaaatttagtaaaaaatcaacggaatactgaagagactgatgaaaattacacaaattaactcacattttacattgttcttccaattttgcagttatttgccattagtaaacactttaaatatgtctgccactctgatttttagcattatttttgttaggagtaactatgtaaagcaagtctgattagatgatcctcatatgtaatttaaccaaacgaaagatgtcttatgttaactatttagaacagcccatttatttaaatgttgctcatttaaattacttgacagtcaggaattaacttttaattaaggagtgctaccatcagacctatttttaagagttttcttgtgtgtgatttgcatgttatatacaaatgaggttaaagaaaattacaagtcaacaaaatgaacctaacatcaaatgtccctggagataatttttttattttatgtaatttatctgcatctcttatagaaatactttttttgtcttttctccctatctctttgttgtgtacaatcagcttttaaaggatccagtggtattaattttgcattgcggtcaatcagagatcttatgcaaatattaaatattgcacaggcatcataactaaatttagcrtttcatttggaatagttccttgtgccataactccctgatggtgtttataactcagcatatttatatttgtatgtgcatttttatgtatatgcatttctctttggtctcataaaaaagtaaagtgtgtatttttttctaactctacagtcattactaaatgaaaattaagttgtttttaaggcatattttttaaaaggaaaatgatgttaatctgaatgaaggttaaatagaatcccttataacactctggcactatgtggtcacatcattgaatttctgataactttcatattatactttagtctaactactcaagatcagtttagttttctagtgtttaggaaagcttaatgaaaaatataagacaacagacaactagaaaactagacagataaactgaaacagacaacagaaaactagataatatagacagagcgttttccgtgaatgaaaactaaaatgcatcagtttgactcacagtggcctcctgccttctgctaagtatgcacaacctaaaggtaatattttaagtctcattctctgacaatgtagtttgcaaacatagagaaatattcagatgtagaagaatatggcttctctaatggccttgtttgtttttagctacaaggtgacatatatagttctggaatgaaagaggcgtcatcgggcagaatatttcagtggctgtattatgggcctagcaagtaacctgccttggaattcctctttattattttgagaacaaaggcatgccatttaacttttttcagcctcagttttttttttttttttccaactgtgagaaagagaaagtgtcacctatttcttgttaaggactaaaggtgttaaaatgctagaatgtctggcacatagtagatatttaatgaatgtcagtttatcttgtcttagctaagaattttcatgctttactatacagataactcttggattttatctgcattcatttcttctccaaaaaaagggaaccaggaagaagagaagcaaaagacataactttacaatgcctagctaacattatcaatgccaaacacctactggtcgtggtaaaaatgatttctacttcaaaagacaagattgctgtaaaaaatcattgctacactatgaagttatgctgtaatgttacgctatgaatttgttgtgctataaagaggaaagaagatgtttaagaacaaaacatgctatccagagcacacctccatttttgcaattacaaaatgtcttctttctttgcttctcatttctccagttcctccctcgtgacctaccttgaagatcacctataagcagaacatgataaatagcatgcccagtagaaatggtagttgtgagcacatttaaagtgctctgtgatgttttactctcagctgtattgaaatatagttggtgatgactcattctagaaatatgactattaagaatgagtacatttatttcttcaataataagaaaaccaacagaatggtaatcccagaatcttagttctacttttaacatttcacacccagtaagttggataacggatggcagagtgagcctgcgtaggtaataacttattattattacccttaccgtacatggcccttttccttgtacttttctccttgagccaataatgactttgatggttcagtctttctgcactttgtagaaaccatatcccaaacagtattttctagacatcarttctagcatgtgaaagaatctagacagcctctccgattttcatgcttctgggacagaaaagtatttatcacaggtaatgatgataatccagttaaatttgttatgcctttccttactttcaaagttaatttccatttttccattttggatgctgtgttttatggaaattgtctgtaaagagtctactagccttacatgtaatggtcagcagacatatttgatacctttctttttcctttagtaaaaggagttgtaagtaaggagcaagtgaaaagtgaaggggaatttagtatgtctcctatttggcagcaactgcgcatgctattcaatctttaaataatttttaaggaacttgtctcttattgtaaattatgtctggagaattagaagtgctacacataaaaattctgtctttggaatcagtacagatccatgttaacctcgttaaaatgatgacttctcatctaacttcaaatattcatttttaccttattaagtcatagagtttagctaagcactgagggtatgtcctytttgttattttgattctgaaatcctcctgatggtttttagggtagttatggttaagattttggtgccacgcctgatatttcctaccattactgtggtagtgatggatttcttctgtctggacctccgcttctagtggttctctgatctaagcatggttggaactttgtactgacctcatactatgcctagtcacagagcttgtaaaatacagccaaaattttattaattcagctatatctcttatctctagaattggatcatccatggctcctctgtcagagttgtgaaaatggtcagctttgttacgttgagcctgaagcactgatcccacaaatcaaaagaccacgtgactcaattcctagctcagtcatcttttctctttcgacctttgtgtatatacttagtgtacctgtctctcgaaagtgattccagcaacatagattacataccccacttaacagattaaatttcattagacttatcaacgaagatcctttgttgccatattgctgctatgatagtcctatataggaaactccagcttcccatcaggatttgaagctagactttaccataaattgcaacagctgccagcctgttgacccaagaaatgtggtgcattcaaaaagaaggaacaaactcagacaagtaaccagctctgtacatcaaaaatccttccggtttcggtaaactatcctgtgactatctaactttagtccctgaagggtattacgccttatttaccttacaaaactggcatcctagaccttcctaattgagttgaacttcaaattcattgtctaaatcctaagaaatgttgaattttcacaaaccccatttcctgcctgctctctccttttctcccatacatccaccatcagatttttttttgtttactttctctctgataattcatgagtaagtttaaaaaaaaaaaaatgtgtggccagagttttctgttttctgtaratattgctgtgggtttgcccatgcctagttccaacttttaaataaatatatataataatatatttatgttataaatatataatatatttgttataaatatattatatatttatataattaaaatcttatatgtaattataacataaatatatatgatattatatacatatatatatttctttttttttgagatggaatctcgctctgtcaccctggctggagtgcagcggtgcgatctcagctcactgcaacttctgcttctagggttcaagcaattytcctgcctcagcctccccagtagctgggattacaggcacacaccaccatgcccagctaatttttgtatttttggtagagacggggtttcaccatgttgagcaagcttgtctcaaactcctgacctcaagtgatctgccgacctcggcctcccaaagtgctgggattacaagtgtgagcccctccacccaaccgaaaagaaatattttgatgctatgaatgcatttgtcatttctattctgtttcatccatgtgttcttcttgtttacctttgtagtagtcatttacagtgaaaataattgacaaatgacatggtgttatgttcttgaaaacaaacatacaaacaaaaacaaaaaatgaaagcagacaaatgamcaaaatggccaagtaggtgtttaaaggcttaaattgagcaaagaataaaatggtattttttaaatgttaaagaatgatgatgtgttttaatagtattgttaactattgaatcaatttatgtttagtctgcttaaaattatattttggattcaagatggactactgctatcaattgattagattgaaaacaagcaagcaagaatctagacracacaaatgggggaaaaaataatgagatgtattggacactttcctggctgtaggaaaagagctttgataaaaggagtgatgagatataattaagcacaaagtaacctacatgcttatttatcagtgaatctttcagttccagatcatttcttctacaaaaaactaaagaataaaaatcagtctttcagtcactgggtgacaggatgcactttgatttttccaggaaaggaaagccaggatcacaggcatgcgcatgcacacacacacaaacacacacatgcacactcacacatacacacacaagctcaagcgcgtgcacgcacagtactttggcaagtagagtgttagctccccaagcatgagcttcaggccagactcagtggctgtgatagacccatgcagccatttgacagattttgataacctttttattcaaagcagcatgaagggccaatgaaggattgctgatttttttttaagacaggatcttgctctgttgcccaggctggagtgtagtggcacaaacatggctcactttaactttgaactcctggacctcagtttcccaagtagctgggaccacaggcacgcaccaccatgctcagctaatttttaaaattgttgtaaagacagggcctcaccatgttgcccaggctggttgaamtcctgtgctyttgccatccacccgcctcagcctctgaaagtgctgggattacacgtgtgaacaactacacccaactggattgctgaatttttataacatgtctctggtaactaagatcctttgaactatgaccattgaattcctaggacttgtgtgatctcagtagagcaatgactcacttccctcaggttttcagacttagaggaaaatccaaggatcagtctgtagtataatgctaggcatgaaaggcatgaggaaatgatgggagcctccagacagaaaaggtmtcccactggtgactgatttctattcagagacaatgccatccctgtgattgaagctccaacacactgaaaaggtgtgaaaccaagaaaagtctctctttcaataaaagttttccatatttcaaaaattttcagaagtaaggatttcttaagggaaaagccatgaataaatcaggccctttttttttttttttgagacagagtcttgctctgtcgcccaggctggagtgcaatgatgtgatcttggctcactacagcctccgcctccctggttcaagtgattctcctgcctcagcctcctgagtagctgagtagcctcctgaggcgtgtgccaccacacccatctaatttttgtatttttagtagagatggggttttgcaatattggtcaggctggtyttgaaytccgaaccttgtgatctgcctgccttggcctcccaaagtgctgggattacaggcgtgagccatcgtgcctggcctaaaccaggcctttttaaagaataggatcagaggtctggtttcttcttcttagcaaggtcttgttttcctggtaaggccttgttttctgcttagaggcatcactacaaccagcctgtcatctgtgaactcttcccttggtgggattcagaagtgtagctcctgcatatgtctctccattatgggagtcactggattctgtggttatttaattagaacatgcctcactaggtgttggctacacctatttgagctgaactagaaatgcaaattcctgctacacrtattttgcattacaaagtgttctactttttgaaagcttttgagtaaatggcaaatctcaactgaagactttgactcttctacaggaactgcatggaaatgtgaggaaccgaattggaagaatgaacacagcctaccatttggttttcaatgctttgatttttaggtggctttgtagtaatggatggaaagaacaaagatctgtattaaacacatgcttgcagcgtctacaaaaatggtttatgttttaaaagaagcrggggaagacctcagtcattctgagttattacagctccaggagatggaagtgttttattagcccatatatatatagatagatacagtgctaccaggaaaaaactaatgaattataactaaggtcctwtgtatggaccttaatattccttgtgtctgacgatgcaggaatttagccaggcaagctgagataaggccctaacctttgctctacttttctttttatgatcttyttccacatgcccttttttggtttaaatataaccaagatgatttccattagatttttctaacaactgcatgatgtgtgtgcgtgcgtgtgtgcatgtgtgtgtgtgcatgtgcgtgtgtgtgtgtgtgtgtgtgcatagcagcaaagccagatgatgatagcaggatgcagaaccccaattttttttaatattatgtaatgtagaaaaggagtgtgcacacctgtttgcttccttcccattgaacaacattaggttgaaagccaacagtagaaaaacaggtgcttgttatgtttgagtgtggagccccaaaaatggaaaaagaagaaaaagaaaaagcaccgggttttagggaaggcttctttaggcataatgtaaagttaatttatcattttggccctgttccactaaagacacagaatttgcrgcaatactacctccccatggcctatttctctgaactaaaatgtacattttctttagagaagcaagaactattatgaccagctagtcctggttttgggtggcgggggtggcaagaaaaaaaaggaaatcgttttctttaagtaaagcacttaaaattatatgtttttttgaaactggttttattcctgttcagattggtcatgagtgaaatgacgtagagtactttaaaaagttagattttcatgtgttatttggttaccatagaatttgtactggaaacctaacagcagatatacatttaataacacaatgtattacagggagacatgttttgctactctgatcgtgaacttgggaacaaggaactcctgggagttgtgggaaaatatatggactgaaattagccaagtgttatggagcaagattcatatgctcaaacctacttttactgcttcgttgctttccgtgcagcaatttctggcctcagtgaggaaaatgttgtgtttgtggaaacataaactggctatttatgtccacaaccatcacacaaacacagaactgcagtgatttggctaaatggtatatagcaacgtgcagtctggggttttagagaggcgtgtttcaagctgcatgggcgacattctaaggaatattaggctttttacctgcaaagccactgttcaaagaggcctggctcaaacccgaaacacttggaagattgtgtctaaatcctagaacccactttttgctacacttttagggaggctccttgcctcaaagtactgaaagtttagattgtttaaaacatttgtcagaaatcatttcctgggagtgaagatgcttctataactcataggcacatcactgccttcatcatctctgtaaaaaacatatcatttcaagccaactatggtattgtccatcttaatgggatcctttatatcaacagacacgtagtctagtgagattaggaaagcacagtgacagctttacctgtaacagacgttttagtgttaccggtgagtattgcatattgagaatgggcctcagttcctctgttaacatgatgagtgtttcctagattgcgtgaagagtaatgagaaaatgtgtgataagcagtttgaatgcctttgaaagaggtgtagtacaaggtgtgaaatacaaaggaactccagcagttagctcttctcaaattttcatgtatataaatataaagtagtgtcatttcctgaatatgatccctattctttttccatcattttcttgcaaacactgttatcctcaaaccctcttctactctcacctccttcactagtctcatctccatgttttcccgttccaaaggctgcaggagagaccattagtttcattaattatggccctactcaaaagcctaactctcttcatggcctacatattaaacattaattccaaccagattatcaatggcttctctggtatggttgcattattattttatagcttcattaacttcacctccttatttataatccatgtcctagtcaaattgaactgctgcctctcaccaccaaacatgacatttactttcttacctccgcatttatttgttttttccctttagtggaatgccatcttctcccacaaccataggccaaattcaccttcttaatatatgactcttttaatatagttcccattctcacatttattgttaaattcatgcctgactgacctaactgattgatattttctgttgctgctgtgaatatgatcacattatttcactgggttttcttgatggttactactggtatccaaccatatcatctccagatcgtgattattttatcttctcatcttctaaagctgtatcataatttttttattcctgccttactgcattgattagaacttttaagagcaatgctgaatagtagcactgatagtcaatatcctttacttgtgtttgacagtcatggaaatctcccctagagtttcactgttaaggatcatttagattattagctaaaagcagatattcttagtgatacagaatatcattctagttttacaatataaagacatgttttgaaaaacctaaaatcattatatttttgcatttttaaattttaaatataaatataagcatatatttaaacaagtacatatataatatccatttaaacatgcatattaaaaacctgaaaatacaarggattgtgtaatgaatctccatgtagccatcacccacttcagccgttatcagttttgtttcatcttcatcccagtcatttcccttctctcttactattttatagcaaatcccagacatcttatcatttaatgtataaatatttcagtatgtatctctaaaagataaggactcttctatttttaaatatatccataacatgtttgacacacataaaaattaatgataaccccttaatattattattcattatctaatccatgatcagatttcctacatttgtaactgtttgaatcaggatctgaataaaattcacaaccattttgattggttgctatatttcctaatgctattttaagtgttgatattcgaatttttctccttttttcactctttgtttgattctagccctagctccctttgtctcttttttctacgtttaacttttttttaaagaaaccaggttgtttgtcctgtaaagttctctgggttttattgcatcccctcttgatgccacttaatttagtccctgttggttacatgtatgtggatgtttgattaaattcaggtttgatttttaaagataatactgaatagttttacaaaaaytgactttctaatttcatcaaaggttgattcggtatccattgaaatgaccatatgacttttatttgttgatgtgccatgatgtttttttttaaatttgttgaataagataatgaatttaccttatgatttctctcttttgacctttcagctactttcatttctaagtgggctttagttggtgaataaattaacatgtcattaaatgtcacatggtaatttcagtagcttgttgaataactgaatccttgattcttgttggatgttcagtcctctttgttttgatttgttttgcttggtacgaaagatttgactagtttggaaagtgacaggttaacattttctacattgacttgaccttcttccacccaaaatgatcctggtagaaaatgcagagtatagtaaagaatgtgtgccttccacatttagcctggtraggtctataaatatatcaaattaagccagtcagatggcctgctgatatttgctttgcaggctagacggattgtactcctttagaatctaagtattgatggaaaaagattcaagggacagcttgaaagtttgtggactccggctatggaaattttatactcatataaaactgtcagtgattagtagaaaatatgtagcagaactgtgtttctggaattggcttctcagctaagaaaagattattggctttgtgaagaagaaaatgtagctttcttgtaactccatttagtcaattatccactatgggaagatacttttcttcttctttggaaaagctatgacatcctccatggtattcgtatcattgagatgtttctcctgagaaatagtagacttaggatgattagactgtgccatgagtaaaatgcactgtctgaaaaaaacagaaaaaaaacagcaacttgtaggtttgaaaaataacctttcctggcaatcttattattctaaggataacactgtctaatgacaccaaatcatttgctcagccactgctgggaacttagaatctgctttctgtttagctacaaatgagatcagtgttacaacaaaaattataattttgttttatcaggagaaacacccaaaggtcacttttcattctgctgaataggaagaaatgatatcagggtctgcccagaaagcttgtaagggagaaaggaatcttacccacttaggaagcattttctaattcacttatgtgaccttgggcagccttcccctgtgcacttttgtgaattcttagctagaggtattttaytaaagactgcagaactattcttttgagatgatctgtatcctcctttaaaatataggataaactataaaatgtgctaagatccttgatagtcctatcattctatatatgtttgaacaatgccaaagcccaagttcatcagttaaaccagttaatctccattggcccttggtgtcaacttgttctttggacaaagtgtcaccttgtaggaagtctacaaacctctaagtgctcccagcgtattagctaagtcctgagctccatggagttggatgccctaattctgctttagaaagtcctrgttccattaaccgtctcctgagaattctcctggcttccctttttgtttcttgagcagagttcagtcaaggagaggtcaagagagatgatacattacttccagtcactgtattggctctgggaacctccaactctatgcaggttctttgatctcctctggccactttctttctttttcaagtacatatttgctattcagcaaaggattgaatgacttctcaggaaaaaatgccaacccagaatgacaaggcttccgtggttctgagcctggctctgaacctttcctttggaaaactaatgactccacctatcattcccttggcatctagagaagctacattaggtggcacagctctttctgctcagcttctgctccagagcttcatcttcaggaaccacctaagcatttttttccccagtaggagttcagtctgctcattatacctaattgcaaaggagctatattcagagcaagaataataatttcagattttttaactggacttcaaagagcaggaaagtatgcagattcctaaacacataagcattgaagatattacaggtaaggttaaaaaaaatctgtaattttgtagtgactagcagtttaatattcaaacatttaaaatgtgcatattttattaagcmaatggcgtagagttatttggtttaattttctgtaagtaactcgtaaagaattgtcctaaaagctgtgggtgaggactaattcattcaagggaaacaggatctaatgattgcyttgtgaggtatatatacactgtatactcatgctaattcctgctaattgtcaaagaagaatagtggctttttatcagcagtttgcatttgtgtaatggtcctggtctactggttttgtctacttcactgataaggaaaacaccacttaaaacaagcaagaaaagcaagccatcctttacagtattattttctttttagcctgtcttgagaagaaaaaaacctagccttctacaggaaatactgtttgattccatgggaaaatatttagtaacaagcagagaacacttgattatttctcagctatttattctgagtatttacaaaatgggcaatagtattatttccaaaatcttaagttgtaaacgaagtttatattacagtctacatgctatggatatgacactattttaaaatattttatactttaaaaaattgttataacacataatacataatattgtaagtaagtttaattcttgtaatttggaaattcagtcagaaatattaaagaattatgtagatcttgaaagggtaaaataatcctgcatttatgatattaatttctcttaaattgttcaattttattttataaggaaattaagtggttatacatttttgacaagtagttttgataaagttaaacacagattattgatatttacttaatgctttataatcactcaatgattgtcactccaaattaggccatcttttttcacattttgcagaagaataatttcctaagaaacaactattgaggcttggttatatatgtaacatttcagtctgggcagaatttctttttttacttttgtttgctcaatatttatgtcattagtaatagtaacagtatcatatatttgtgtgcagtgttgcaactgacaaagtgttttaataaacttggcaacaaccctttggtatctcatttttgcagctgaattttctaagacaggtagatagagagaagtcccacagctaataattggaaaattgtgccttggacctgattcttcccagccaacttcagtgttcatttcagtacattttatctatgaagggtttcttctagggagagttggtcatggtcttacaatttttaaccccagtgattttggttgttatcattatgtcttgcacataataaacagtcactaaagaattgtgggtcaggcgtggtggctcacgcctgtaatcccagcaatttgggaggctgaggtgggtggatcacgaggccaagagatggaaaccatcctggccaacatggtgaaaccccctctctactaaaatgccaaaaaaaaaaattagccgggtgtggtggcgcatggctgtagtaccagctagctactcaggaggctgaggcaggagaattgcttgaacctgggaggcagaggttgcagtgagccaagtttgtgccactgcactccagcctggcaacagagctagactccatctcaaaaaaaaaaaaaaaaaaaaaaaaaaaaaacaattgtggaaggaggtgaggaaggaaggacggaaataaggaaggagggaaagaaggaaggaaggaaagaaagaagggagggaggggcaggctgaaaggaagaaagaagaagggcatgaaggaaggagggaktccttttgtgtggtaaaggatttttggaacctctaaatgataatagtagtcccccagttctcagctatttcagagaactgtccagcttccccagcaatgatcatttgtcctgaccttttttgccaaggcaaaccaggtctagagtaaaatactacaaaatacattctctggtattaaaaaggaatggccaaaaccgtaattacttttgcaccaacctaatagtaagtttctgctttaccttatactttcttccttataatactgtagttgttgacataccaaggaaagtgtgtttgggataaagtggtcacataaatggcaaacatcaaagtaatgtcagattttgtagtgtttctaattgctgttcattttgtagtcactagaagacaacttacaaattgtgaaaaactagtcataaatcagagggagacaaggtttagtgagatccagttcacctccttcctggaacaactattggggggtatcatcttttatatattgaaacatattttatcttccaaatctttagtttacctttaatacaactcctcccagcccccccagaaagaatgctgtttgctctgattggcataggaccggctttgtcggtttcattacatcctggttgaattaccaaatggaaactgatttaggaatactgagtgtgtacggcacagagaaaaaatatcactgcgaaatttataggcctgtgtaagactgtcagggccctgtgttcaaataaagagagcaaaaggaaacctggcgaaaatcaccatctccatcccggcttcttccgacaattacaacttattcctgtgcttggctgctggtttggagcagctgcatccactcaggtaacacttcgcatcacctgggagctcattgttgccttacaattcgtgatcattttttgatctcactactgctaaaggataaaagtgctaagcataataatccataactgtatgagatacttgctacttcatttccctccaagaatcattttgctatgaaatatcccattactagtttcaggtaatgatctaagaattttttaaatgactatgtcagagctaggggcttcaggatagcattacaaggataatcatttcagagagttatatttttaaggccttttaaaaagagggttgtttctagtttttaacatatttgttaatcttattttgatgatctcataaaatcagagtctaaggaagagatgtgtctatgtgttgcttatgtcactgcttttttttattgtttacattttataaggagtgtctacatttgggggggagttggaatgttggttttgttgtttttagcaaaagccttggcatttgtcctgagagagctcatgcagtgtttgctgttcaggttgcatgaagggcaatctttagcaacctgtcagagatgcaaaggccactagggtctgcttgaggttcagagttcctctgcaggactgcgtggtgacagcacaccacaggtggcccattcagcactgtcatctgggacagcaaggataccctgctccatttgtcatcctatggaattctgtcagcagttgaaagcctttcagcacaaaacctttaacattcgaggcaaacttcctaattttttttttttttttttttttttttttgaracagagtttctctctgtcacccaggcttsagtgcggcagtgcaatctcggctcactgcaaccaccacctcccaggttcaagcgattctcctgcctcaacctcctgagtagttgggattacaggggcacgccaccatgcttagctaatttttgtatttttagtaragacggggtttcaccatgttggtcaggctggtcgcaaactcctgacctcatgatcctcccatctcggcctcccaaagtgctgggattacaggcgtgatccaccgtacccagcccatttcctgatatttttaaaggcaattgccgtggatgaaaatattaatacatagcacctaaataagtagttttttacatgaaaggatattatgttaagattatatgctgtgtgatatatagaaatgttgtatactccatgattttacagaccaaacaatgcaaatcatgtttcccctcttcttaatgaagatgttaaagtataactgataattgatggtaaaaatcacctgtctactcattctttcttattccttttgtttagtttgtttgctttgtaagcctggaaaagatgccttgaaatgtattttgaaaatagctttttgttggagtaataaaaaattagtccaattcttatttatccatagtaatgattccagaataacatgcacatccttaggaataaagttctcctttaaaaaaataaataaatagcatacatctttgaagtccccagatttccattgtcaagatttttctctyttatacatacccaaattaagagccttccctgcttgcccattaatatttgctattattcattgaatgccaatttttttttgccaattcctttatctagattatttataacctctacagaattctgtaagagtgccattacccctcttttcttaatgggaatattgagcatctgagtggttaaatgacttattcaaagccagtaggagacaagacttgaaccacatctgtctccaaatccaagttgttttgagtgtcttttgctgttattcgaaaaagccatgctgagatcaatgaaaggggtccaaaaacatgccttagacaggataataagaggtaagcaaggccatgagtaattcagaaatggaataatcagatattgagtattccagtcagatagaataaaaatcaagcaggggagaagacaaaattaggttatgtgtcacaacaaaatgtagactttcgaaggaaatgaacaggaaaggcagaagaaaatggaaaagtaatacatggcaggtcaaataaaagtaaacaaggtcatatgaaactcacatgcaaataataaagtagaaactagtaaggaagacagaaaggaattaaaaaggaattaaaaattcataagaatgttatcagtagacaagacaaaaaattgcctctaaagatggatttttttttttttcctaaaagagtatatagaatctgtactggcttgatatactggttttgcttttcatcctgaaaatatcattgataaacattgtgtatattagactatttttggttgggactgagtattgcccatggtgttcccaatgatatgagaagaaacatcctggtactaaatgccctggtggcctggggctgaragctttggctttgtataattcatgcacccactttcatgtaacatgaagtttgacaagtgaatattaagttcattatatgaaggtgttgcaaaccaaacttgaaacttatttctacctctcattctaaatggagatattttgtagtgctttagtctacatttacagtgatattagactctttccatttccttaaaagtatgatggcgtttggacattcaaccatgttcctctaagaaattagagtagaaaagaaatttagaagagaatggcttctaatctgcatgttgatatgtatctgactaataatctataatgttttcatttggaacaaataagccaacttgtgtttctttttcaatatatacatcatgtctaaaaaatgtaaagtcaataggcatgtaaaacatttcaaaaataaataattttatcaattgattgccattaaaaatagatgtctaaattgagctgcactgacatgactttataccattaccttgaaccttcctgagaaatgtattttgcttaatgacaatagagcttctcttttccaactacctggaagataaaatattggttaaaaaatgttgagcctcttttcctatttagttatagtaaaattagttaactctataattctctcttttataatttgattctatgtagtgagaccacaaacagcttaacttctctgctattgtttgtaaggtctgcaagtttagtgaaatctgtaccttatatgaactcttccttttaggataatttaagattaaaggctgcttagaagggggaaaaaaagtccatgttaacctttctcctttctctcctcttcagctacatctacatccaccactgggacaagccatcttgtaaaatgtgcggagaaggagaaaactttctgtgtgaatggaggggagtgcttcatggtgaaagacctttcaaacccctcgagatacttgtgcaagtaagaaaagaaatcctgtgtgtcgcttatgtctataactccttgtttcagatgattctatgtctcatgatgtattgttgctttttttccaattttgttgcatcatgttgaataatgctgttttatatgtagagtgttttaaaacattcacaccattcgtcatcactcctctgtcatatgcagaattgttttttgctcttttcaatgtgtgtgaggtgttttttgtttttgtttttgttttttgccatgttatttatagtgttgctttccttgtggtttttcttgttgttattcagaaaagatgtgcagatatcacagaggcctataacttttggtatctacttctacatccaatgtatgaattaagctgtaagataatgttgctttcttatcccagtgatcacctgccaaatgaataagacaacaaagagaagcagaagggcagaagattatttactgacatatatctattacacttgggattgtcttactgttgcataactattttttaaacggagtttagttttatattgctagtaaaaaaagagaaaaaagtaaattgcatatatttggaaatacattgtatgtagcatccctgtgggtgacagcagtgttctttcatttgtctatagatatatctagaatagcactgtctttccaatgacctgaaggagttgatgcaccattaagaagtatccaatttaggcctgggcacagtggctcacgcctgtaatcccagcactttgggaggccgaggcgggcagatcacgaggtcaggagattgagaccatcctggctaacacygtgaaaccccgtctctactaaaaatgcaaaaaaaaattagctgggcgtggtggcacacgcctgtagtcccagctactcgggaggctgaggcaggagaatggcgtgaacctgggaggtggagcttgcagtgagccgagattgcaccactgcactccagcctgggtgacagagcgagactccgtcccaaaaaataaaaaaaataataaaaataaagaagtatccaatttattctctctcaacaggcagcgtaagatagtgatagtatcagtacattaaatatttaaaccttgtagtaaaaactaataggactcattaaaaagtatgtttattttgccatgcattttaagtttactgttgatatttagtctacatatggtatatggacttaaaatttgatgtgggcataaaaatatatttaatattttattgaaatgatgaaaatacacctttgttttcctctttaccaacagctatatcccaaaagcaaggtattttaaaagtcgttccttaaaaaatgtaatgtagaacatctaataaattttgccagcagtccccagcgaaaacatgcagtggggacattattctaaagcagcaatgcttgttctaaaggagggaaaaccattttgtcacaaaaactgttttctgctagaatattggcgtgtgacttaaatcttgacaaggaagaacaagtctgttagagaggcaattgaactgataggagcaattagcaaaatgaaaaaggcaccagaaatagtcaacaaagccatgtcccttttacatcacagaaatactatataaatatttaggtgccaattctaataaaatcttaattatatttataagtaaggaagtgcatcttaaaaaacatatgttttaaagacaaaaaaagcaacgatcgaaaatgccattttgtaggccatgttttgctgctctctgarctgtggtagattgggcgtgtctgtagcgtgcctgatgggacctcatggctctgaacaagcaccttccagaacttctcctttgttgcactctaaagctcttctttgaaaaaagtagatacagtgccaagacaagtgttggtggttgtatagctgattttatcaaagacagacaatttgtaaaagtaaatgtaatctgttagagtgaataaaagacttagagccagaacagtaaaattctaatctcaattactaaacatctctttcacggaaataaataatttttataagccaaagtgaaatgataggtaaaagtcttgcaaaaaatattaaagcaagatgaaatacgagtatgaggccaggtgcatgcctgtaatctcaacactttaagaggccgaggcagacggatctcttgagcccaggagttggagaccaacctggacaatgtagcaaaacaccattgctacaaaaaatacagaaaaataattagccgggcatggtggcatgcacctgtagtcccaactattcgggaggctaaggtggggggatcacttgagcccggaaggttgagcctgcagtgagccaagatcatgccactgcagtccagcctgggtgacagagtaaggctgtcaaaataaataaataaatagaataaaaaattaaaaaaagagtatgtagaaaagatcattccttttagatctgaattatctcatacgactatgtttattgtttaaaaaataatcttagagattcacttcttggtcactaaaatattcaaatctatatgcttgcagcagaataaaaatctgtctgatttagtctttagttctgctgacttgctgtgaatacagcacaaatatgagacatccccatatttatcatagcaaattgggatgaaccaggtttttagtttgtaaggttttctctgatcaaaatagaaaatgccagaagctgagaattgtaatctataaaatatgaggttcatttgttatatggggaaaccttgttattttttcctaatcttaagcawacagtgtaattgtattttaataaatctccttgaaaaagcatttaaattataggtccttaaattcttctcctttttaaacagtgtacccatattatctatgtctcatatttttacttcttcagaaaagcatctgagaccactatattttaattatagtaatgaaatatgatcatttttcatcatcacttagcaaagatttacaagctgagtgagtgcatatgatagtttctgcatacctctaaggaaccagggcagttcttttccacatattaatttcagctattctttagccctcccacgtccaatacaaaacatgcaatcgsgtaagtgctgttcagttttttcattttaatattgtgccaacaactgcaatttttcttcactcaacacagtttctcattaaatcttaagcctaatccagtagtaaaaacgtgctatattttaaaaatcttgaagtgaaacatttgttactcttctgataattattaaagccccaagccatcctctgagctaattgtctagtggatcattcttgycttctagttctaagaaattacaccttttttttttttgtaattaggatcttttaggtaagttatttaaattattactggatcttatcagaaagaaaatctttgacatctatgattttgataacttccccctcctttgagatggtgactttattcacatattaaagcaagccaraaccttgagggaagaattggagagtatattttacatccaaaatacttcaaacctttctcgttacatgaaactgtttttatttttttaaatcctgtatgtaaaatatgtatagcattaaaaataatcactagtcagaatttaaacaaagacataatatactaggtcttatgataatacattgttcactagaccacttgaatagaaacagaagacataaaaatattgcattggctcatcatggtcctgtctatgaagccagttcatagtttccatatggtctatctgtctagagctaagcattgctgaagcatgagccacatcattgaaaatcagctttatccctgactaaagacatgactcagaaacaccacaagcatggaagtttccaagtagtctctctggtcacctaatctgctgttgtcttcttgggagttgaagtagaagatgttacagcaaatctcttttgtctctctgcttagaacaaggtgtttcgaatggattaaacatattaacagtgaaaaacttctctgaggagaggtttccggattgcttggacctcctcctggggactgtgtgggaatttcagtggtagttctcatcttttatattttgtttctctacagtaatttaaaatttattctgtggaaaaaatagttactattccagattataaaaagatgagaaaagaatcmttccwttttgtaccctctgatgctttatgtagtcctgtggttcaaagaaacaagacacatgaaatcaaacatgaaattgtccagatttcctcttgcatcttttctctattcttgtgtatctgttcttctgaacagtttcagtggagaactactttggaagatgttgatgtgattttttttaatctaaaaattattttatatcaggctgtgcttataagtccaacatgttgtccagtggacagatgtgccttcatctggaggggattagagttttaaactaccaattttggtgaacagtcttatgtcctttcacttcaactctctggacaatatatttatttataacatgaagttaatatgttctccaaatttcttcccagggagtcagtgaaattaaatgagttcatttctgctaaagtacttttaactctggggaagcaaaatttatttttccttataataaaaagtaaatggtagtattacattctctcagtagacattggaaaaatatatacacctgttttaacagactgtgttatcatgtttaatttctttttttttttttttttttttttgaratggagtttcatgctcttgttgcccaggctggagtgcaatggtgcagtctcagctcactgaaacctctgcctcccaggttcaagcgattctcctgcttcagcctcccaagtagctgggattacagacatgcaccaccatgcccagctgattttttgtatttagtagcgacagggtttcaccacgttggtcaggctggcctcaaactcctgacttcaggtgatccacctgccttggcctcccaaagtgctgggattacaggcatgagccaccatgcctggcccatgtttaatttctaattctttattttacttaagagtagcagttttatttggtttgttgggaccaccaactatctttataacttttctttgacagatcgtttaatatttctgatcattagtttccttataatgcaaaaacaacaaaaaacaaactaaatttggaaagatggaaggtatctgtaaacatagacttttataattttgtataatgaatgtttatgaagccatgtagggccttattatattatacattattataagagacaggtatgaaaaacataactatgggagacaaaatcacagcaaatataatactttaagtttgatagataaaatatttrtcaaacgtatttgataatatatataatgtaaatgaaatatttatcaaattatgcctgaggtcgcaatttttttaatttttgcaatcagaccttggcaatgaccttgagcagtagggtattaaaatcttccacaggcttagcgtcccaataatggaacactaagcataaatggattaacatttgtttatagaacagctatttgccaggcactttttaaaacacagagaaaatataaggaatggtgtctgatctctgggaactcagtctgttaaagaaaatgaaattgctaaaatagaaaatcaatgagtgaatatatgccaaatggtacaatgctgactattaaggtaatacaaatttaaagaagggaaagaaaagactgaaataagttagagaagactttttaaatataatcatcatttatagagtctttcctttataccaggaaggcattgtggttgtaggaattctttctctgagacacggtaacatgcagcttaattctaggaagtaaaacaaacaaatgaacaaaataaaagaactaagttaaacagtggagccacttaatgacctctgaaggtcaggcagaggactttgggtattgtaatagctaacagggagccatagtaacatctggagcagaagagtggcaccatagacatagcagatgtttagggaagcgagtcttccttacaggctagaagaagtctggggactaagtaagatggaaagagaaagtcaaagacatcaaaggcactagctaaggttaacattttataaaatactgacataatgatgctgatgatagtaacttttataatatgtattagtagctgaattaatataattaaacaagggggcaacggtacaaactcacagttgtgtcctgcagtctcatcatcatggctgcagaaagagaaatttggaaaaaataaacaggactgggttagaacttccagtctataagaacacacttttgttgtatttgtagtatttgttgtatttgtagtattgctgctaacaccaataccagcctagaagagttctttctttagaatcagtgttacacttgcctgtggtacttctctgttcttgaatattgtaacatttaacagatatagacagcatttgtgagagcaagtggtgggactcatgtggatctagatagtgcgctcttcagacgactgtgtcctctatttctttcatgtcctcatatatctagaatcctactatgtgcttatgaggaatttattaactcatttagacttttaactcactgaagtagggttgaagaaaattctttagtttttataggattcagtttaggtgtagttttacctaaaatcaggtgcattgtctaagtgttctgaatagcttcattcctcacttataaaaatcagttgagcagccatgtacatttattgaactcatatgagacaggctctgtgctcatgctacagacaaagtagtgaacaaaaccatactggtctttgcctgatggagtctgtaggctactgcaagtaacaatcatgtttcatgtaattaattgaattataaatcacaggtttgccaagtgctatgaaggatattaattgagctaagggaatgtacaatgaaagacctagtcagaggctgactctgctctgtggaaaaaagaataaaaaaagagtatgcagtcatactcttcagatgtatatagagtcaatttaaaatatttcattgtgtatatataccacattttcttaatccattcatctgttggtgaacacttaagttgattttataagttggctattgtgaatagtagatttttttataacttggctattgtgaatagtggattttataacttggctattgtgaatagtggatgaatattttagctagattgatttaattattcaacgttgtattcataaatcataacatcattttctaccccataaatgtatacaagtacaaattgtcaatttacaggaaaacgaatacacaattttgaaatatttatattgaatgatttaaggaaaaagtgaatatttagatgttttatcacagaatgaggctggtgaagtggataaggctataaagcccctcagaacccctaagctgtttgacgagacagggaaacttcctcaagagaggaaaaccaaaccacaaattagcagtcgatatgtcattgtgtcacaatgacgtggagatgtatgggatgtagattgatcccacatccaatgaaattgtttgacccccaacttaaggattcatcatgtagagtaaacatgggcaagggttttagtctttctgcagatgagcatttcagagcaagctgtgcaaacagagatttaggaagggcaccaaggttcaaacaagaagttaattcacaaacaccgccaccctcattattgggattatatgtcctggacattgaaaaacaacatttgaaaaggcaggacaagttaggtttggtttggttttgtttttttctcagcatttacccatgagtctagtgtggccactctatgtatcctcttatctcatggattggaaactagtccccagattgtcattaaaaaaaaaatggaggatatatactgtctgaacagtggtggtgagatataggttggatctgaaggaaacattactggaacattttatatttaatattttctttaatgatgttaaagaaggcattcccttggggaaataaatgtcttttgcagatgatgctagaaagaacgctaaaacacaaattagaaaagcatatgcaaacctcaagaaacttcacttaaaggtagataacagaatgaggttcatcttggaaaaatgcagactaatagtaacaatacctttgggaaagaataatctacaacacagatactcagccagtgagtgggcgagttctgggcagaatgctgagctggctaagaggtgagaaaagtcaatgtttgcaacacgatactgtaggaaaacagaccagcatagttggagctggcgtaracactgccacctcgagtttacacagagagagagcaaaggctttggtgtctgatactttctcaccaatattccttgatagagatttgttgatatttctatcatttaatatttgtaaacataggcatcaaataatttcaaataccacagctagtattgaggaaaagcagacagataatagggacttttcatttttcgacaaggtattttttaaattgtccaaatatttcactgtggaatgatgactagagagagaggaaatatcagctgtatttttttttcttcctcttgttcctratcaagggagggtttgatgaaaatgaagctgagaagagaaaggatgtctaaggatggtttataaattgaccataaatgtgtggtttataaaattagccaaccctaactagaagtttcttggggtccgtgaatatctataaaaacgtctagaatctccaccaagaaaaaatggaaaataatttattcaattggaatataaaaaatacaccaagcattaagtttatttcaaaatacatacatctatgattgattacatagtaagcatatcaggatattaacagtatattgaagttattattaaccacagtttttattatactggtgctgggcagaagtttggttagtagaatgcactgctttattgaatctgaagtaaactggtatttcactaatagtatttaaattcaagataacagacttacttttaaagaatcaaagaatcttttccaaattgcaaacatgatgttaaaggattttattggagggagggagactgtgagaaggatactgggaatttctgtaaaaattatttgagggcaggcacagcagctcatgcctgtaatcccagcactttgcgaggccaaggcgggtggatcacctgaggttcaggagtttgagaccagcctgaccaacatggcaaaaccccgtctctactgaaaatacaaaaattagctgggcatggtggtgcatgcctgtaatctcagctacttgggagactgaggcaggagaattgcttgaatctgggaggtagagattgcaatgagctgagatcttgccactgtactccagcctgggtgacagagcgagactccgtctcaaaaaataaaaaaaaaattatctgggagtccacagaggagagtgtatcataaactataaaaataacagacagatgttcaagattgacctgtgcttgcaaatcaattaactgtacgacaatcttcccttttttttttttttttttgagatggagtctcgttctgtcacccaggctggtatgaagtgttgtggtctctgctcactacaacctccgccttctgggttcaagcgattctcctgcctcagcctcccaagtagctgggattacaggcgcccaccaccacgcccaaccagtttttttatttttgatagagccattcaccatgttggccaggcttgtcctgaactcctggcctcaagtgatcagcccaccttggcttcccaaagtgctgggattacgggtcttagccaccacacctggcctgaaagtctcctttgatacaattgtggatcagatacggacgctgtggtctgatcttaagttcattttcacggacattttgtgagagcctattatgagccaggcattgtgctaggcattagagatacaaaatgatcagaatgtgatcattgtctgacagaatgtgatcagtgtgtcacagatcatcacaatacagataagtgcagtgaaagaggtcaggatagggtgcaatacaaaaggcaaggagagaattctccccagagcatagaagtgggtgatggggaggtggargacagggaaagagtgatgcctaagttcagaaaaaactgtgaattttcaccccattaataacaaatatagaacaaacatgatcatgttaagagcaaatactaaaatttttaaaaaccctgatttccatcttctaatctgattaatgaaacgaatggtatatacatacacacacacacacacacacacatatgtatatatatttaaagctacaacaagtacttgttattcagatccttagattgttctcagacataaaattcttggaatttgctcaaactcatgccaaagcttatttttcaaactcaggtttgatttactgttattcttatcttccaggaaagtgatggattgaatgtttaacatacaatgttgataatagaaatgtatcagaagccagtctccctagtctgttagaagtaattccacagaatttcacagagcttatagatcaactgggttttcatttgcatgtgctttctctacacaatcaatgcagtgtgcagtttgcatatgcagaaactatctcagtttctgcttttcccttccatctcatttggcaacaaatttagatgtctctgaaggctacatccttttgttgctgaacacttgagttgcttgggcacttgcagtttgttttacctcaacgattgtcttaaaaatccattttatcaagaaggatttttagaagtcattgagttctgtcgtccctgactggtaatgcattcagaagaaatgatgttggggttttctagcagtgattccatgtgttagaataagtatcatttcccagaaccttagtgggaaaagaggtctttgataatcacttaattacattccttcattttatcactgaggaaaatgagaccccgtaaagcaaaatagcgtgtccatgtgcaaacagcaagataccacagtgccgagagagggcgtttgcctcccttttcccagttcagggcaccttacgtcttgaactttaatctacatccacatctcttagggatcttgttaaaatgaagcttcttattccatagttctcggctgtggcctgcgtttacactagcacactcctaggaaatgctgatgctgtcagttctaagtaataacagggtcttataacactaagaaacaatgctgagaaaattcatctcccaaatgaagacaaacactagcaaaaggatagttctggttgagaggtagctgctatttccaaaaaatgactttcatacctcaagtagttctggtgttagtgcacccagttttccgtatgattttatgatagagataagccatcatcttatgctagcttcctaggaaacatcatgttagaaattcatagcagttagaaaattgattgggtaggatttctgactccctttacctagttgtcttgtgccttctgatcacagaactggttataagatgcctaatgacaatttccttataaatgccttccttctcttaaggaactcgtgattccttagctatttgttaatttaatgattcttactaacgtaagggcatttcctgccttgagcaattgtgtggtgtgtgtgtgtgtctctcttacacatacacagcgtgttcacatatcttatactatgttcttttgtaagaaacaaatggattatttgtgctcagtatgagaattttaacttttatcaagaattcaaagaagcaggatggaatgataattactgaatacatcattaattctggaaacacctgctttaattatagggtttgtctatatgaacttatagtcctggtagagaaacaaataaaaaccctatttacttcagaaataattttgtcaaataagttatatgaaaaaagttcccatgtgttttttcttatatacgttcagtaagaatgtgaagacattcttattgaagcatatgaaatggcgtctttttgagaaatgacccaacctctttttttttttttttttttttttgagacagagtcttgctcttgtctcccaggctggagtgcaatggcacgatctcagcttactgcaacctctgcctcccgggttcaagtgattctcctgcctcagcctcctgagtagctgggattacaggcgcccgccaccacacccagctatttttcatatttttagtagagacagggtttcgccatgttggccaggctggtctcaaacacctgaccttgttgtgatcttcccacctcagcctcccaaagtgctaggattacaggcatgagccactgcgcccggccaagcttatacttcttattgacatgtttctcaaggtagctcttcctctattccctgcagcaaaaatattctaaacaaaaataatccgtttacttatatgaaggtgtttccaagagtttgaaagagctgtgtcaatataagatgtttgttgtttaagcttaaacacatactcacagggcaaaaaatctgaaactgctagtattttatcgcgcaggctattttcataaagtaggagaattacatataccaagtcacttggtgaattggtttgaagggaaatgaaattacccctatattggtaacaaggaacagttttgttcatatctctttgatgccaaaaatatagtatgtattcttatttactctgtagtgaaaagggttgtgtaaaaatcactagggatgagctaccagagctaacttggataggctctttgcttgatggttgctgtatagatgaactattaataataattatgatgatggatgttgaggattcaaaatgatggtctttctatctgtaagtatattgcttcctagaacctttcagtggccctttttattagaggatatactggtaaaatcaatcctacttaaaatgctttagttattagagtaacagcaacagcaacaacaaaaaagtggtaattataaagagcttccatatttaagcacagccccattgcatgaccttaagaacaatattatatcaagattctagaattttgatagttaaatatatgtgagtgaataacatgaaaaatgttatacagttttaaaaatagtttttccttaaatgcaaaatgacatgtattaagtaattctgcataagaataactgatctaaattttaaaatgtatttgtctttgatttgggataatgcaattaagtgaaatttgtcttgataaaaatctgcttctagtatctttgaacattaaaaacaagagtttatttgtaatgtctttttaaaaaacagggaatgtagtttttcttgtcaataatcattatagtgtgaaagtacttgacttctattgtttaatgacttaacttgtaacataaaacacccatgaaataaatacacaattgaaataagtatataaaagaaaaagctcaagatcatttattgataagagacagggatggaatcatgttagcgcttatcaaaaccagtgtttcaacatagtgagaatcaatgatcagtggcaaatagggtcatgccaaagggaaattgacagctctccgggccatgctgcctcttattccacatttcaacttcactctagttaaatttcagttaaccaatcatttgaagactgaagcaaacaacaacaaaaatctgtaacccacagttttcgtgggacatggttttctaaatgtygtgtcttttcttttctttatattgcttggtaccagatcatttttaggaatctccatattccataggaggaaaattgccagtctgaaagctcagtgtctttagcattttttttttgcttaccacatttttgccctctaggtgccaacctggattcactggagcaagatgtactgagaatgtgcccatgaaagtccaaaaccaagaaagtatgtcaaaataatctgaaatttgctttctcccccaactacagcaacaatcactaccacttggtgcttttacagctcagtcgtaactgattcattttgttctaattatggcttaacctctcaaggcataaacccattcagtgttaccttatttaactgtctctcaaagtgggtccctaagtcatcaatttacaagaatggccagtcacgatggcccgtgatgctgacaaactattgcaggcaagccaaccgagaaacattttcttccaacgtgtgtgaccaaagccatcatatggaaaactgagatgaataaaacatcggatttcattttaaggggttccctttgaaagaaggcaaccacttaaagtgctgggatctttccaccataccaacttaagaactgcattctgtccaaatttttaaccatttgggggaagtgccagagcctgaaagccatgatcagggcaaagattcagttcctgagggtgaactcaccaagtttcagtcaaatgacactgaaggagcttctttctagcatatattcacctcttctctttttctctgtttttctaccattgtttttttgtttcttctctcaggtgcccaaatgagtttactggtgatcgctgccaaaactacgtaatggccagcttctacagtacgtccactccctttctgtctctgcctgaataggagcatgctcagttggtgctgctttcttgttgctgcatctcccctcagattccacctagagctagatgtgtcttaccagatctaatattgactgcctctgcctgtcgcatgagaacattaacaaaagcaattgtattacttcctctgttcgcgactagttggctctgagatactaataggtgtgtgaggctccggatgtttctggaattgatattgaatgatgtgatacaaattgatagtcaatatcaagcagtgaaatatgataataaaggcatttcaaagtctcacttttattgataaaataaaaatcattctactgaacagtccatcttctttatacaatgaccacatcctgaaaagggtgttgctaagctgtaaccgatatgcacttgaaatgatggtaagttaattttgattcagaatgtgttatttgtcacaaataaacataataaaaggagttcagatgtttttcttcattaaccaaacagtttgcattgaggcatttttttaaaaaagcatcaagtaggaaaattaaaaacaaacatttcacagcaaatgagatatcctggcttctgtttacgttgcttagggaacaagtaattcaggcactagtttaaacaattatttatttatgttaccatttctttatgttagtttcaaaagtaacttagaataaaatagttactgttatttgtttaaatatttattttgagatataacaactcaactataggataaatatgtgtttgtatatatatatgtgtgtgcgtgtatatacatatatatataaaacttaaggcaaaacatatatatatatatatatatatatatatatatatatataaaacttaataacttaaggcaaaactgggaagtttggatagatgttcgtggcttcctgaagttttgaacatcattcctaaaagacccaattcacattgtacataattatataaaccaaaccatgtatttgtcctattgtgaactggacacatataacttctgatcctggagctttcaaaatattgcatttaaaatgcatatcatgtagttatccttgtagatgaaagaatggcaatttttttctgtaaaggttcagagagcaaatattttaggatttgtggtgacaccatcactgtcacaacaactcaaacctactattgtagcatgaaaacagctgtaaacaatgcataaaactgatgtgcatgggtgtgttccattaaatctttatttacaaaagcagacagtgggctggatttgtcaaccactgatttagattgtcaattgctcaccccgaaaaatatgtcacatagcttactgcagtttaaattcacctaacataagaaacagtgatgtaagttggttatttaggggtcctaaaagaatcagatttacccttgttctgatgcatgcagagaataagtttctgtaattcctgttaacatagaagtttccagaataaattctataatgtataatgttaagattagacccgtaatgtgcaatcatttatttagggaggtagtatttatttatttacataggctacatatcaaagacaacttcgtaggccattttctgttgtgaaaaattagtaaattggcattgcaaaatttccaaacagccttcactttattcacaaacatttaagtaatatgcatttagtagggagaatttttctatccacagctaaagcaaatagcttgatttaatttttaagttaattttttaaagctaggatagaaaataaaaataaaagggaaaaatagaatgttatttaataccttaaagcatttctcttagaaatgtgtatttgtatttaaataacatagactcagcaaatccatgtggctagataaatgcagtaaaatcatattttagactttaatgacaattctgatcacttaattaagttacacttacatttttggtgttaagagttttactgtgctttgaaggcaatgttcaggcactatataaataaaagcattaaaaatgaagctatttcccagcataattatgtagttagatctgacagtagtaaccagagaaaatattttcaacttctcttttagaccatttgctttttcagaagatatcattttaaaataaccactatgtttttgtgaagttcagagtgtgattccttaaataacttctttagtatgctttcaatgccacttttggacgacatccaggaaagcagcattcatatttaacctgatttaacaaagattgattgcacatttatgaacaatatatgtaatggctgtgcaacagagatgcctcatgtctggaaaagcaagagcttccaatcagaaattgctttccagtgttgtcttaccgagagttttttcaatttttatctctgcaaacccctacatagaagtcagaaaaataaatttgtgctgctctaagaactttatgttcaagtagcagtgaaagccagaataaagatagagaatgtcaccatagtgaccgttttaaaatttaattgtttgtagtcttaaagtctggaaaacataaattttgaacacaaactaggaaaagatagtccccagcttcaaagagaaacattcaaaacttaccaaactgcattttcagttgaaaaataacattctaaagaatagataattttttaagtttattaacataaaacttacattattcagacttgatacagtgattctggtcagaatgtccaatgagccatttactgatttataaaaactgacttaaaatatgaaagagagggacaaatgtatattttataaggcagtcatttgccttgaaataaaacattatatttatagtactttctaggaaaatattgtcraggttagtcagcttcaaatttgacctaacttgacacagaattcctagttgaaaaaaattgtgttcatcsatatgtggtgtgtggggggtgtgtgtgtgttcrtgtgtgtgtccacacgtatgtgtgtgtatacaggcactccataatcaatgtacagattttagggaggaaaaaagaaaaagcacccacactttcaatagttaggggcagtacagagcaggtatgtcatatataaactaacataataggacctaattatagaatagctcaaatttagaatattttaaaagattgtaattttagaacttttaggaatattctcacactgagtaaatttagcagatatccttaaaagtagttttgaatcacaggttactagtgcatccatcatttgcatggatttctaaatgcaacctgttgaaattattcttgttcatcaaacatgtatcttgctaaaagtagaatagaggaacacttcacctgtgacaaaattgccataaattccagccaagtgttagtgagattttactgtgtgtgtgtttgtgagtgtgcttatgtgcacatggaatttgaaacttaaggagaaagtctccgttaacatttcaaagggcccagtgacactacggattggcatatgtgaaaaaaaacagtatctccattttataaaggtaagtctaaaattaaaagacagacactaaattggtcctgtttagaattggcattgacagaactcctttcgaaatctcagcggtacagaaagtcaagactttaagattttaagtctttgaaatgattagcataaacaggcccaagatgttaaagagaaaaatcctaaatgtcttcaaattttaacaggaaccacaattgcatggatatataatttttgtaaaagaaagttgttctattgttctttcctttaatgcaattgaaaatttaaattaacctacaggttaatcagttttcctcaagcaattataaaatcctaagacaaaggattcgtgagtcaatatttaatagtttctgaagacttttagatttaaattaattttttatattgctcagagcacagcaggaaatcacatgtagaaaaggaaactagattgtttacagtaaactttgtgtttttgaattattaatttaatttgaaaaatgtagtggctaggcagaagttcaataggaagcatgtgattcttaatgagtccaggccaacattagattaagtagaacagatagaaagtaataaccttttcataaaatgaaaagtgttcgtgtattctgctttttttttttttttttgacttacaatgaaagaaatgtagctaccaatagtaaaaatgaattagagcattatttgctctgggtctagtatgactgatgcatgttccctctgcttgtttccttgttagggcttatggccagaagagattccagttttaagtaccaatttcccattgaattatttgaaattggagctgcctgatatgaatgacttcccgtgaaatgaaattatagttaggctgacagacttacctataaaactgtaaatgcagtaatatgtatgcatgggcatgctactaattttattgaagacttaaccaagctttctatgcaactaatatagatcatgagcagtgttcatgtaggcatggagtcctgactctctggaaagagtttctgtagacatcgcttgattttaacccttaaattattactgactggtaggagaaaaaggcaagggaagggagggggctctagaaagaaaatctgggtcccaccttcatggaaatgagtaaggaaatttattattgacttccttggaaaatgaatgttttcacgtggatgttccaaagtttgtattaagaaagcaaatgggaaaaaaaatgaccaatttttgaccaattgagtgttgcacggaggcaagagaaatttatctggatttgaataaattattttgctgtgaatattgtgcaaccaagttaatcgtaactaaatcccctagcttttaatttatgaaaaatatagcttatttgcttgtgtacactggacccaaggcagaggaaattattatatatagtgcttcccattatccttgttatgcaatgtactttttgatatatgtgtttgtgtgcatatatgtgtgtgtgtatatatatatatatatatatatatactttaaaaaatctggggagctttatttccttaaagggcagcaagtttttaagttttcaagtatccccggagcttacagagtttttctgrctagttaacgagaatacagtaaatggcccagggtacatctcttgatgtgtytgctacccaagctgttaaacccttctgctgtttgccaacatatttcacgtctcctttactccccaggcatgcccagtgaggcatgtgtttgcataagaaatattttgttaatgaaaaattaacatgtccaaagtcactaaaaagttccacggcagaggcaggacccaaaaccaagatgattccagcacactcatctcctgctttttccctctctatatgaggtactttttccatgcccaaatgcaagtttttgtaagagaaacacccctccacagcattttcttcacacttaagagataccttgccatatcattgaatagcccttgtatctctcgaggcagtgatcaaagaaagaaaatatagatctccattgatatgctgtctctccttccaacctgcttcttgaccacacacataggcgcatgtacacgcgcgcgcgcgcacacacacacacacacacacagagagagagagagagagagagagagagagagagagagagagagagagataaaggaagtcctagagccttccgcatcatgaaatttgattatcagttttggttttgagaatgaaaagtgtcatccctggagattttttattttttttatttttttggggggcttgttttcccccacttcctcaatggagcctctgcaggttctgctgttcttgcaatcctggagtctctggagtcccagctgccaggattgctggctcttggctcatacctttgagtccacttccctgggcagccctgcaggtcctccaagtggctgtgtgcatgggagtccagcattctggagaagtgatttcactggctctctgtgatttaaaggagtaataagatgaaaaaccctaggaattggatctttcccacttatttttttccttacagtttgaaaaaagtgaggcgtagaattgtcctatgccatacagaacttatatgagaaaaactagaaggagtctccagtgtcccaagcccctgtttggggttttggggcagaagcatttgttgctttctgtgaatgaaacagacaagtgatgaggaaagtggaagattagaagaagtaaaagagatacagctaagaaaataattagataaccaatgagcaagaagtatttgaggccagctacccacaatcaaaaatccaagtccaacctgataacattttcagaccaaattaccatcctcttggcttctgctcctgcctctgccaatgggtgtctttgggtaaaaattaattaattaattaatttaattaaataaaattcacctccttggaactttgcttctgccttttaaaaaaaggaatgaaatagtatcaaatgccttttctgattataaagataatctttccattcccacacaaggaaataatttaggggatagttcagcgacagaacttctccctcagtaaggtcttttaagggttaataaagacacagtgtgctggtattttgcacacctcataaaaagagacgttccctatgtgaactcacagaggcgtacctgagcactgcttcttaaccacacaccatttgtctggttcaatgtgcatgcacagagagccataatagtcatgtgtaatgtgttttggagtgcagtgtattgctcttttctgaaactttttccctwtctttcttttttttgtcaactttctgcattggcagagcatcttgggattgaatttatgggtatggaccaatcatcattccttttagcctgcagaatttagagcctatgagctgaaatctttttcccttcctactcttacctttcagttcctaactaatttcctttttctttagaagggatcatacagctataacaatgatttctctgccttcaatctatgattagtttactgaaatgttactgagtgcagcaggttttagattcctaagcatccttcacttagagtttaaaagtaccctacctgctgcaaattcacatatatcccacgctgcttaacccactgattggatctagctctgctgttatataaaagctggggtaagtagtagtagcacataaaggatacaggggaaatccactcagagacctgagaacaaaggctttttaaatccatctgcttaaaaaacacacagcatcttagcctggtaggatttttggcatacaatgtaaaaatcatctatttaatataagcaatgtaatgtatatagaaagcccttacgttacaacacaatattaaatgcacagacttgaattactcagattttctggagatactcaagcaccaccctagtcaacttcattatcttataagaaggaaatagaaaacagaaagaaagcagccttgtgctattttaggtggagattccagtggtaatggaattaaatttgagtcatgaagattatccagacaagtaatcaaatagaaaatttcacactgtcaaagtaaaagaaaaatatatgagtatacaaaatttggacacacttttttgtaaggccttcatcctacatagttgggattgaagaccagtctctggggagtaaggagctgtgctaccttcccagagactccacagggccaggccagtcagtctttttcaatgctgcctgcagtcccggaccatggttgggtcagtgacacaatgtcctgattcacagaatatctggtccccatccagctggcttcagggacatcatgcagcaggggcatcctacagctgctgccttcttttggatgataacatcacaggctggacataatgtagtttccagactttgcgggaaatgaggcagttgcaagctctagcagctacagggattgctcaatgggttgcccatttcttcctcaaaaaaaaaaaaaaaaaaaatcaggagtaaactaccaatttgatgagaagcccccaggtgcacgtgaatgggcctttgtgcctcgcagaacatctccaaagagggagaaacacaagggggagcacctctattactagggagcacgttgtgtactgaggggagctatctattggagtttcttccctcagggaaaaaaaaaattgtcccacttatgaaatggattattggcctatcctgcagggagggaaaaaattctaccattaccccaaaccmttctatccttaacagcatatttctcatttttatagctggagggtctgactatagaatgtattgtttctgtccccaacagtaaagtgaaagacagttgagatatataacttccccctcagtaagatcttctatgggttagaaaagacacagggggctgctatccgcatgcttctcaaaggtacagtttccagaggctcatagttccaggcttgccggtgtactaaaccagaacattgcatccttcaggaaaatcagaccttaaaggtcaagtacaactcagaaaggtaagggctctgtttcttggccaggccagatcagactgaaaaatgtgcttgatctggaaacatgttagtccagccaaaccatgaagactctggggcatttgtgctcattgagagacagacccaccgatcggaatgacagactcttgtttttagccctgtctgtctctaatttgctcttccccagttgacctgacacataagaaaaaaattaatatggggaaaaaagaggttaaagaatccattgtttgtattatttttcaccaagtatttttccttgatcacattcatagtgtgggatcacctgattgagccaaaccatgaaaaattcaaatagcaatgaggataagggttgtagtgcatctggtcaatgctgatgtgaatataagattttaatcccacgtctgtattctatgggccttcgcttgaatcagctcattctagtgctgttacattaccctttggcctttactgagctacctctttatttccatgaaatgatcattttactggaaaatgtgtgtcttcctacactgcatagaaagaatgcacccgtcatcatgcaccatatgtttccaaacgcagctcaatctattcttctgtaattaacaacaaccaaaagacaacttgtcccaagaatccctgagagtatgcatgattcctttttcccatttagcccttgtccatgtccccatttttgaagtctgcagaagcagtttcctagcttctttctaaagataggatgttaagatgtcagtagacaagaataaccacagacttgcccatcttcaaagaagaaaacaatagaggacggaaaagaggacaatcatacagggccttcatctcttgtcaataatacctacactcctatttcttcaccaactcatcacagcccagggagctgtgctctgcatcctgggtcccagggagagaaggaccagtggggtgacagctttgcttcttagacatgtatcctaaaacctgatcaggataccaagatcaggaagagaggctacagcagcagcttcaaccagataacaccccatagaaattaattccctgtcctgtggctatgggggaggggargcagcagacatatgcaattaacatataagcactcacattccatgtcctcatctgacttttgctgcacacaaaatccgtgataccaactcaatatctcctggtacattgtttcaccgcaatgcaccagccgcttcgctttctaattgtggcttccacatgactgctagattaggagttatgctgtatggaatgacccttccaactttgcatccaccttttmttcccacccaagcatttcctccctctggttttcttttctttctttatttttcctcccttagtatcaggcatgctgtgccagggacttcagatggctccttaacttttaacctwgttttcccttcctcggtctctctgtcattctgtcagtctgtckgtcctcttggtttgtttttcctttccacctccaacccttttgatttgtttttgtatactctatgcagcattctagtcctttacccackgacttctcttttccttctcctcctgttaataatcagtgctatattaatttgatttgacaatgttcttgacctgtttactggaatttgattatcatgggctcggcttgtaggaaatgttttgtttcatgataaggtccactgtatcctagaaattaaaattcactttttcatttcaagaaaacttcctgcaagctgccctctctcaaaagagaaaaaggtgtagttaaaggtgtagttgtgccactgcagatataatatggaaatatgctttgaggttcccttgttgatgtccagaatagtcagctctgtttgtacagtattccccagttcttgaccaatttattgatcataatggcaagtgaacagcttacactgcttatttcataccagttgagttctctttctgagtgaacttgtgaagatcttccaataaatgtaattagactcactggaagctcaggtccttagggatcagagtccctattaaatcagcaaatcttgttaagaacctgacctaccttagtataatcaacttatcccccaaagaaactaactcgcaaatagaaaaacttctatgaattagagactgatcgcattttgggtgcagtagtatctttggttcaaagttctaagtgtcacatttccttagtataatctacattagctcatttgccaagttggccaacgtaggaatgtgcactctattccaaatcacacatcatttgtactggtgacttctttggacaaataaaacttgttcctaagtacaattggtggagtagttagaattgtcttccaaaggacaagtcaccatttgggcccataactgtcctacccatcacataggattttctttgatacagtgccctgctacctcatattgtattgcttcttgtgttcacattttactgttaaatcacagasagcctgactcaatttactagttaactacaagccaagttcatgtttgcaaatgtctttgaatttaatatatttaagttagaaatgactctttgtaaagaccactggatataaagtgatgatataaaatatctgggaaatacaaaaaggccaggggctgggggataaagaggggaggaaggaggaagtggggggcgcccagtgatgccaattccatctcctttaattggtgttgattcctgttgtctttgcaagagctttttatattttattttgcaagagactacaaaaaaaaataawactacagagttttaaccaaatagttattttataattaatgtttatgatttccaatttactatcaactatatatatctctatagcttataattagaagtaatttctgagtataatatttgtattgtaaatggccccagctggcttttttatatttatgttcaaagcatagtgcagagcatgttgtaccttagctatgtgtgtaaacgtaaagaattgtcatgtatttattttcttgtgaacatggacaatgtcatgcagcatgcccactgtttggttgtagtcagtcctggcaagtggaagtgacctgtgatgacatctgctctcatccctttccagaggcggaggagctgtaccagaagagagtgctgaccataaccggcatctgcatcgccctccttgtggtcggcatcatgtgtgtggtggcctactgcaaaaccaagtaaaccttctttctccatgcctttctctctccttcatgcaragacagcttagatggccagggctttgcagaatctgagctccacagcctagtcttggggataaaaaaaaaaggaggggcagggggagattatttcctctgaataatccattttgaggatgtctcctaaacacagaaatagaaagctgtttgcctattcatgtaaagatttctgttcaatgaccacagcccctgagtggataaaggcctggagggacaggcttgtatggaaggtatgtgtgtgggtgggacagaatgaaggcacctcattctaaaaggagagggagggtaccagaagtccatttgagggctttagtataattaagttatccccaaaagaaactaacttgcacctagaaaaacttctatgagttagagactgactgcattcagggtgcagtagtaccttcagttcaaaggactactgagaacaaatccaatttacactgaaaattacgagataaaggaaacctttcgtggtatctgaaatgcagttttctgagttatagtgattattattattatttttaaattctatctaattaggttgccagtatgaatgctctcacagcctgagatgtaaaaaaggaatctcaggggaggaaaatgaagcaaaactttctttgaaaacataagagagaaaacattagaatagatttgggttccctatgtttggtcttgaagtttggtccgtattaacaaattcaattactatgtgacatggattctcttcacttttctctcctacatataacttacatttcaagcctaatatgttaaattaacaaggtttttgaaaaaatgttgctgcacgatactctgttgccaaaccatccatgggaatatttcataatctgaatgttgcattgaggaagaaaaataatatgcttttatgccacaaaatccaaagcatggattgtattttgtcaatatcccatgatttagtgtgttgccagaattaagggatagagataagccttcctggagtcgacctggtgagtctcattagattccatctcaatattcgctgcctaattgcacaaaaagcgttaccagagtaggaacatgttacgattgtgccaaaatccgctggcaaaatatgtccacattctcacgcgtatacatgggatacactcacaaacatgctaactgtgtatattcaaaactcagttcattttcttaagagaccccaggaaaagctataaatgaaatcactcttataaattctacagcacattttttttttttagacagaatctggctctttcacccaggctagaatgcagtagcacaatctcagctcactgcaacctccccctccctggttcaagtgatgctcatgcctcagcctcccgagtagctgggacgacaggtgcacgccaccagcccggctaatttttgtattttttgtagagacaggacttctccatgttgcccaggctagtctcaaactcttggactcaattaattctcttgcctttgcctccgaaagtgctaagcttacaggaatgagccaccccacccagcccagcacaaattattatctaagacaaataagtgtccatttgtaagacttaggcaaagatggattgattaggaaatttgtgattttagtcaattatcaagttatttgtgttatcctatttttttcttgtctctcagtaaaacagctaaatttccataagaatcccaggtggcttttaaaatctgtttggtaaggatgtgtggtttcacttattctgggatacagtggacatactcccttccctcttcctcatcaccagtctactgccttgaactactcataggtgttggtagaataaagacttggctctactatgaaatgaaaataatcaaaaaaaaataaatgctccctttcttatgtccaggaaacagcggaaaaagctgcatgaccgtcttcggcagagccttcggtctgaacgaaacaatacgatgaacattgccaatgggcctcaccatcctaacccaccccccgagaatgtccagctggtgaatgtacgttgactctggccagtggaaaaaactgagcctctctcctttgttcagacgccttgaagtttattttcgaaagctcttaagcttttagctgctgccattaatcaccatggcttccaggaatccaggtttttgccaggagaaaataatgggaacatttttaaaagtggatttggttactgtaaaatcagcacatttcctcttataaagtgttcattaaggggttggaataatagtgttgggtttgttctgcaaggaggccatagctggggcttgcgtggagagagtggggagaaaacaaatttaatagtacgataatcaaaaagaatgttttcatatataacttggaaatacaggctactccattctgtaactgattagtacagataaccgagcaaagagctttagagttattttcttagggcaattcacagtgcctgatgatttactggttatgatttccaaaggattctgatttcctttagggcgtggaaaggtcaagtgacttatcaaacacccttctcagtagcaaaagaagagtgtcatgccagcttcttccctggccctttctaaatgatgtcaagccctccagatgaaatatatccataatcattaaaatatttttttcatactgtaccaaacactcagcattcagttttttaaatacaactagatcatagaatattaggttctggagagtttgaagatattatctttcaaatctctctttttctttttacagataagggccagagccgcaccatctcttggcttttggagtattgctctttatattccagcatcatccttcttattttcaaattattgctctgatgtatggtttttttaatacacaaagcttgaagcttatattgtagtaccattttctatcctatagaaaaaggcatattttgaatggaacagatatatcatagacccaactacagagttggtggttactaaactatcagcaagtcttgtagcaaaaaccttcaaaactttgttggagcaaggtgcttataggttaacacactctgttgccttttcaccctctaacagtgttcatcacaatgttctccacatttgataacgatattcactacaaaaggaactataatctgtcactctgcatgttataatatataaacggtagaatgactgcctagattacatttactgctcacattgtgcatctttgggctttaacttttctcaaccttatttcttcaatataaaaacagacctaaaaataatacctacttcagagactccttgtgagccttaaataaggtaatttgcataaaacacttagtctagtggcatttagtgagtgttcaataattgttaagtatttttttcattagattcactgagcttatgttgccttccaaaaagcaatagtgaaatggttcagggactggaagtaggtcactgtgtatcctttccttaaatcaagctagctgtacttcccaggaagatccacatggaatagcctttccactaagagaaccagctagagtttcaagcataattcaagctgtatatttttggatctccctgaatatatttagagcccgcagaccgtcagattataaagtgccttatttcatcaaagagtattcctttctattggttttcctattatttaactcaatttggtataaatactaacagcaattaaaacacaacttcaaaaaggggcctccctccctaatagaaacagtaaaaactactgtggtttgctgataaaaataaagtagactctgactaggcatggtggctcacacctgtaatgccagcactttgggaggcagaggtggacggatcacctgaggtcaggagtttaagaccagcctggccaacatggtgaaaccccatttttgctaaaaatacaaaaattagctgggcatggtggcatatgcctgtaatcccaactaatcgggagggtgaggcaggagaattgcttgaaccgggaggtggaggttgcagtgagctgagattgcaccaatgctttccagcctgggcaacagagtgagactccatctcaaaaaaaaaaaaaaaaaaaaaaaaggagaagaaaagaaaagaaagaaagaagagagaaaagtagaatctacctgcattaaatagaaatgtcctccatatattatgtgctttgtcaagatgtgtgcattgacaacaattgttaagtcccttatcagtagccttgttagccctaccactgctaacaagttaaacatttcagtgacattagtagggcaacatgggcactaggaaatggaaggagaaaggtaggcccaacatatagagattctgaatatttttttctagtgctttgaaatttgaaactatacaaatcacctgtctgcttctatttcaaatagcatttagccttcttcaccttgcaataccatgaaacaaatgaatgttggatggatatttgtatggaattctagtcattaatttaaaataaaatagaagaaataggacttttgctgataaaatgtagttgggatgatgggccgtacattggatgcacatccagagagtatttttttttttaactctattcatctaatctaaaagccacagtagccaggacaggattttccacctggccattggggaaatggaatttattacaaatcagctgtacaaaaatagatttgtgtgtttctgacagtgttaacgtttttatttacatgacaatattagtgctttgattgacatgaatctacgtgaatcttcaagttgtgtctctttgtttatccagcaatacgtatctaaaaacgtcatctccagtgagcatattgttgagagagaagcagagacatccttttccaccagtcactatacttccacagcccatcactccactactgtcacccagactcctagccacaggtatgagaatttaaaaattccacggcttttctctcagaatgaattgttgcacattgccttttgatatccctgcctaagaaaggaggcagtgaaatggatggtctttgggcagcaacagattttgaaaatcaactggctttgcccttaattcctgcataaatttgaacctcaattaggtaactccacagggccgttgtttcccattcctgagattgtctttactcatgccctgctactcaccgaattgctacactgggacaagtctgtctttggctctgcaaaatacttagaagtcaatttctttcagtaattggattgccctgggaaatgcacatgagaattggttaaatagtggaaccctaaattctcaaatgccctggtgatccccacctgagtgcacttactctaccaagaccaacactagatctccaaatgtagctcatacaaggaaatgtttctttaatctaagccactcaagaacagagagattataattatatactgaggagtggcattcgaaaatatttattgaatgagtgaacaagtgaatatactgtatccttacaaagccaatctgaatcaagatcctctctatagcaaattacctttgtggcgattctattcggagacaagtgatgttacagtgagctccgggtgcatcagtagtttgaaacatttgtcagaatccattcctttcatttccatttttttgcatataatttttgcacgaaatatctgattgtctctcccatttcctccgcagctggagcaacggacacactgaaagcatcctttccgaaagccactctgtaatcgtgatgtcatccgtagaaaacagtaggcacagcagcccaactgggggcccaagaggacgtcttaatggcacaggaggccctcgtgaatgtaacagcttcctcaggcatgccagagaaacccctgattcctaccgagactctcctcatagtgaaaggtaaaaccgaagggcaaagctactgcagaggagaaactcagtcagagaatccctgtgagcacctgcggtctcacctcaggaaatctactctaatcagaataaggggcggcagttacctgttctaggagtgctcctagttgatgaagtcatctctttgtttgacggaacttatttcttctgagcttctctcgtcgtcccagtgactgacaggcaacagactcttaaagagctgggatgctttgatgcggaaggtgcagcacatggagtttccagctctggccatgggctcagacccactcggggtctcagtgtcctcagttgtaacattagagagatggcatcaatgcttgataaggacccttctataattccaattgccagttatccaaactctgattcggtggtcgagctggcctcgtgttcttatctgctaaccctgtcttaccttccagcctcagttaagtcaaatcaagggctatgtcattgctgaatgtcatggggggcaactgcttgccctccaccctatagtatctattttatgaaattccaagaagggatgaataaataaatctcttggatgctgcgtctggcagtcttcacgggtggttttcaaagcagatactgccttcaagatggccctttattccagaatgttttggctttcctttggggagattgggttgggttgggggagttatagcaaaggtaaaatgaagaatggaggaaagtaaacaaagagatattaaatagtaatattgaattcatagattctctttctccattttcacctgagctggaagatgaccagtatttctagcccatcagtaagctgttacctgttcctatttgtttgcaagtctgctgggttttactttattttattgtcatctcaggctaatctttgaccatttactaaaaggtttacataatgtcaaatccatacttatgtggtagttacatgggaggagatgactttgatagagtctttccactcttggactgggaagttacttccaataaaataacacattctgggcttgaaggcctgttgcttacttttgcaagggcctttccttcaaaatgatattttagaactttgtggaatttatgaaatcagaggtaagctattacctgtttgtttgcaagtccgctgaattttattttattttattttattttattttattttattttattttattttattttattgtcatcttagtctaatccttgaccatttactaaaaggtttacataatgtcaaattcatacttgtgtggtagttccatgggtagggatgactttcatagactcttcccactcatggactggggagtacttacaataaaaaatgacaggctgggcacggtggctcacgcctctaatcccagcactttgggaggctgaggtgggtagatcacgaggtcaggagatcaagaccatcctggccaacatggtgaaaccccatctctactaaaaatacaaaaattagctgggtatggtggtgctgccctgtagtcccagctactagggaggctgaggcaggagaattgcttgaacccaggaggtggaggctgcagtgagctgagatggtgccactgtactccagcctaggcaacagagcaagactccgcctcaaaaaaaaaaaaaaaaaaaaaaacattctggacttgcaagcctgttggttacttcttcaagggcctttccccaaaaatgatattttagaacgttatggaatttatgaaatcagaggtttccctgcaaccaatctatgaaaaagtaggcagggtttaaactgttttaaaactttagtcttaaattcatatttttttaatgtattaaggaagtctatccattctgtttcaatcgttttttgaaacatgaaaaggaagttagagatgaaatcattcttcatcactacaagtgatatttatccttaaatgttgacatttccccactgtgctgggcttctagatgatatctaggactacgaaatattcctgaacctagagattatggagagaaaagatgaatcacttttatatgttggttgaatttaaattagcatttctcagagagcttaatttaagtacccccaaagccaaaagtttgaaggctcaaggcccacatatttcaatttctcaggcacgttcccagtttagaggcagctagctctcacgtctgtatcactgtgactccgggagaagcagggaggttcatacgttttccgttcctgttagcaagagttcagatgatggcattccatgtcatttcaggtcacgtcaaattagactctgtgaatgccagtgtgaagaaaagagtcatttagtgttgtgcgttggtaacattttttatcaaaagctgagaaatgtgactctgaataagccacgtcttcctcagtgccaaaagtcaggacttcttatactgggggaagaaagcatggtgtggtgaaaacagtgtgctcggtggcctaatggcaagagtcactgagcattatcagacataacatgatagaaggtaacagggtacagccaacccttgaggcatcatgaaagagattgaccaaagactgatatagctgtgggttttggaagagagatagaccaaagattggacataacctccattgtggtaactgtgaagccaaattaggttctctcaggcttacctttgactgtgtttgttggacactgggatggatagttccaaattgaatgttaactagttgcatttcatggaaaaaatgaaaagcacacaaatgtatgacactgttgtcaggaataaatctaagttactatgctctttttttttcataagacataaccttatagctgagctaaggagaaacaaggcacacagatccaaatgcatgcagatccagctatcagcaactcatcttagatcttcttccattccccatttgggcttcattctctaagaccccttggcctttaggaaggtatagtatttaagtaatacttctttcccttccgaatccctgagccttggtccttatataagctgagaggtttccaggacctaatgccttcttgtcttggctcatatgccattatttataattgtgatgagattgaaaatcccaaaagctttgatgagctaggcaatttagctgatctttgcatgcactcctgtgaggaaactcttggctacctaattttcgattccaagggtgtggaatttcctagcctaaataattaagcagcctacaatgaatagaaattctctgttctctgatgatataataccgtgaactctgtccccttaccttccctgctatgtgcctcttattgcaccacacttatgcagggtattctgtgctcacacaggtatgtgtcagccatgaccaccccggctcgtatgtcacctgtagatttccacacgccaagctcccccaaatcgcccccttcggaaatgtctccacccgtgtccagcatgacggtgtccatgccttccatggcggtcagccccttcatggaagaagagagacctctacttctcgtgacaccaccaaggctgcgggagaagaagtttgaccatcaccctcagcagttcagctccttccaccacaaccccgcgcatgacagtaacagcctccctgctagccccttgaggatagtggaggatgaggagtatgaaacgacccaagagtacgagccagcccaagagcctgttaagaaactcgccaatagccggcgggccaaaagaaccaagcccaatggccacattgctaacagattggaagtggacagcaacacaagctcccagagcagtaactcagagagtgaaacagaagatgaaagagtaggtgaagatacgcctttcctgggcatacagaaccccctggcagccagtcttgaggcaacacctgccttccgcctggctgacagcaggactaacccagcaggccgcttctcgacacaggaagaaatccaggccaggctgtctagtgtaattgctaaccaagaccctattgctgtataaaacctaaataaacacatagattcacctgtaaaactttattttatataataaagtattccaccttaaattaaacaatttattttattttagcagttctgcaaatagaaaacaggaaaaaaacttttataaattaaatatatgtatgtaaaaatgtgttatgtgccatatgtagcaattttttacagtatttcaaaacgagaaagatatcaatggtgcctttatgttatgttatgtcgagagcaagttttgtacagttacagtgattgcttttccacagtatttctgcaaaacctctcatagattcagtttttgctggcttcttgtgcattgcattatgatgttgactggatgtatgatttgcaagacttgcaactgtccctctgtttgcttgtagtagcacccgatcagtatgtcttgtaatggcacatccatccagatatgcctctcttgtgtatgaagttttctttgctttcagaatatgaaatgagttgtgtctactctgccagccaaaggtttgcctcattgggctctgagataatagtagatccaacagcatgctactattaaatacagcaagaaactgcattaagtaatgttaaatattaggaagaaagtaatactgtgatttaaaaaaaaactatattattaatcagaagacagcttgctcttactaaaaggagctctcatttactttatttgattttatttttcttgacaaaaagcaacagttttagggatagcttagaaaatgggttctggcttgctatcagggtaaatctaacaccttacaagaggactgagtgtcactttctctctgggggaatgatccagcagcttatctagttgacaatcaaaacacggctgataaaggtgcaatcatttctgacatgtatttttcactgattttgaagctagtgattggttgtgtcttcttggctcaaaaagaagcatattacggcacaaaaagcccagcccagacagcacatgcagcattttgtctgaaatacttctagagtcaaacgtgcctgctgtacatagcgatgacttgtcatcatagggaagtatttccatcgtagagtgttcagaaggagtgactgtataggtggagagaagcttagtgactccgttgaaattttaaaatgtggatgaccacccctttctcccccttatttttcttttatctttccatgttgccttgatcaggtcataactatgcatgaacattttttatcaggaatggccgatgtgtatgtgatttgtaatcacaagtaatgattcatcaggaaatgtcaatcctgttggaaagattgcacctttacttgcagaagtgacccccacctgtgtcctgacctctccatttacaggctctctcacccatttcccccacctcctttaatttttgctttactgtcataaagtaggactaagattggtctaagcactgcatgttcttttgtgatggtaaatccaaaggaaggcctataagtattaacatttgaaataactgctaattcaggaaaatggaagaaaaaaaattatttgaaacacagaacccatttcatggcctgcctgatatctgtgaaatcagggctggagctttacttaggattcacatggcctcctaggaaccatgggacaaatgggaaacaggttatcgggggattcatgaagtcagtgagagtaattgcttcttttttgcgggtgaactgaatgtatttcttcaccaaatcttgatgttaacaattaaaaagaagaaatgacatgcaagtaggtcttagcagaaaaatgcaggctgggcatgagtcatgttgttaccctcccacatgctcctacaatccacagagatgcctgtctgcaggttcttgaagttattgttagtatttggtatctcaaatttttcgtcactgttcacatgccactttctctgtgcacagtggtatcctcatttgctttttaacctacactgaggagtctttgtcaggttgcactgattttccaattctgcagtaatgagtaagctcacggcatggggaagaagacagtcagtccaatgaagttctctaaattattttaacattgcctttgaaggccttgactcatccttagctatttcaatgaagaaattcctaccatgaatttaaaaccctaaaaattctgtttcaaattctttgggcattggggtactcagatatcccattgtggaagaattttaagaataaatagaagtttctgttgagaaccatgagcaacatgtttcttacaatgagaattgctatgcattttaaaattgcaaatatatatgaaaattgaagacaagaggaaattgtatttctaacttgattctgatcactcacagaggtggcatattattatagttgggacatcctttgcacccttcataaaaaaggccagctgactgctcagcatcacctgccaaggccactagatttgtgtttacaggggtatctctgtgatgcttgtcacatcactcttgaccacctctgttaataaattccgacagtgcagtggcgatcggagtgtgaacttatgttcccagcatatggaaagctatcttaggttttaaggtagtagaaattgcccaggagtttgacagcaactttgtttcccgggtctaaaatcgtatcccactgaggtgtatgcagtggagcataatacatgcaaatacatgcaaaactccttttgtttcacctaagattcactttctatcttactttcccttcctgcctagtgtgacttttgcccccaagagtgcctggacagcattctagtttctacaaaatggtcctctgtgtaggtgaatgtgtcccaaacctgctatcactttcttgtttcagtgtgactgtcttgttagaggtgaagtttatccagggtaacttgctcactaactattcctttttatggcctggggttaaagggagcatggctcacactggtgaaaataaggaaggcctggtcttatcttgtattaataatactggctgcattccaccagccagagatttctatctgcgaagacctatgaaacactgaagagaaatgtaggcagaaggaaatggccacatatcacaagttctattatatattcttttgtaaatacatattgtatattacttggatgttttcttatatcatttactgtctttttgagttaatgtcagtttttactctctcaacttactatgtaacattgtaaataacataatgtcctttattatttatatttaagcatctaacatatagagttgttttcatataagtttaagataaatgtcaaaaatatatgttcttttgtttttctttgctttaaaattatgtatcttttccttttcttttttttaagaataatttattgttcaggagaaagaatgtatatgtaactgaaactatctgaagaatgcacattgaaggccgtgaggtactgataaactaaagaatttattattcaaaatactaagcaataagtaattgtgatttatttaaagttttgtccattttccatgaaagacatactgcaataaaaatgctactctgtggagacctgggagtgttgctcagcagactacagcttcagtctgttagaccagcacctttcatctcattcccatagttatgctaatttaggattgtgttccatggaccccatgatcaccttgtctatacgttgcttcttgtctgtccattgcttttgccacaccacctgttctcaaatcatctcctccctaccaatgctgtttatcactttcttccttgttgaagaggccacacaaccagacagtactatgcttcctttttcctccatacacaataacagagagagaatattctagggcatgactgcctggatcctggctgttgctatcttttgtagtggcagtaagaaactccttcagactaatgaaaatgtcaacgtgccattcaatcacgaaaggtaacgaaaaatgctctcatggttcaaatagtccaatggcccatagtggcctaaaaggcagccagttgacacctggccatgctaagcttccttataccatccgctaatgactttccattgggcccacaatttacggattcataattttaaaagaggagaaggccaagttaggttcattccccttattctgtcaataaaacaaatcaaactcatgtctatctaactgctcagggaggagcctttgcatgagaaaattctcatattctaagactgagtcatagaaatgagggtattacttttcttactgcaattaacctaaacaaaagccatattttaacaaatagatatttgcatggtacccttcatatattccaagcatttcactcattattccaggtaggttaagagcttctgaagtgtatgaagtaaaggtcagcaatcctttggggtgaacagtggcctcctttggagtttgggggtaacctgagacttcccaccaatgtccacctccatctgtgtacctaattcctattacctagttatggctcctctaggatcatttccaaacactctggatgtccaggaaatttaaattgtagcttttgactgagctagtttttcctatttatattaataaattttcaaaaatgcttgaaatcttcacatttgcaacaactttagttttcatgcacatacaaacacagagagacaaaaattccaaacagacactctccaaaagccaccacactctttcacttgctctatagtcatttagccaaccagccatgcagagaatatttaaaacttaaagattgagacattattctcagtttttgctgaggctttgtaacgaaattgaacactataagcagctattgtagtaattttggttaaaattgtttgcctgggatatagtatttgaggcagaagcacgtgtgtgaaggaggtgaggtggtttggaaagagtgaagactcgcagccagattgaatgtctggataattactataattctcccttcttggttgaaaccatgttctctcttgatttttaaacccaggctgcctctggaaacaagcaaacctgagtctttctaacctgagtcttcccaatcattagatttcttttctgtcctaacgatgaatgataaaaggacttgatgttcacaatttggggttataaggcaggtctgaaatctggagactcaagatgctggaaggagtggaaagtttcgatgactttatatgaatcactttgcactctatgtttggcttgtcctctttgaaactgatttactaaaataaatgtaagggaactattactccaaaagattaacttggcaggaaataccaatactttcagtttatgaaagacaaaactgtcttgttgctacaggaagctgcaatattcctaacctttaaggttggtgttgaatagggtggtcatgccctcccctgcaggtatctttaggctcctgttgacctcctggtactataactgttcgtcttctctgggtagctattgattttgaactttaacatgcttcaaaactttattcatcagggaaataggaaaagagttttgttacctggaggaaatctattgtgatctacctgagctttttaaaaacagaccaggagaaggaaaccagtaatttttaaagaagagacagagaatgggataatagtttcacccaggatctctttctaaccctttcccttcaaatgaacttattggaacagaattggaaagaagaaaggacatctctgcccaccccacaggatgccaaaaaggctaaagaattacctctgtagatttaaacatctttaatggcttatgtatagatttgctaatacagagagaaatgaactattaaataaaaatcacattttataatatttttatggcttaaaacatcctttatctcctttttgttctctctacatgatatggtaagtgatgaggaaaatttaggctcaggaaggttaaaatctttcttggagttacacatctaagagagctgcagagctgacacttgtacccaggttttctgactgcaaatccagtttctttctattgcgttcttcccctttccctgcctcaagcagaaacaggttttttattttcaacctttgtgtatacagtatgttatgttacatctacagctaagtttctttttagaagaatgtgagcccttctagctttggtttagagtgattctagaagccaatttccttggcttagtgattctatgcacctttcctaaacttagctttctaaggaaatgaagtgtacgagtgagaatgaattcacaatttcgacatgtaggtagcatcctaaagtgaaaagaggaggaaatttgtggtcaaagcactctccccaccacttagaaacttactgactgtgggcagcttcctcctccaagtttccttcctgatttacaagaccgtggtgtggtcaggattaaacttgaatacatgtaaggaagcctgaaagtgtctaacacatagcgagtattcaaatgccaccttctatttgatccttcccctccagttccttaagttttggaatctaggtttctcagttccaaatggattgacatttgcatatccccattgcacaatggatcaaataaactttatgttatcatttctccaacatagtgccagtaagcaaatcctttttaataacaacagtatgttgagaaacatatcaccaaataatatttaactttgtagctttgataagttctttaggttttggttttggttttgttttctgagacagggtcttgatctgtcacccagactggagtgcaatggttcaattttagctcactgcaacctgtaactcctgagctcaagtgatcctcccacctcagcctctcaagtagctgggactacaggtgtgctccaccatgcccagcgatttttttttttttttttttttggtagggacaaggtctcgctatgttgcccaggctggtcttcaattcctggccttaagtgatcctcctgcctcggcctcccaaagtgctggaattacaggcatgagccaccacccataactttatgtttgtttttttgatgcagtataagttcagcttgcttcttatgcagccataccatttcatgttaactctgatttttagcagcttattacattagtgttttattattaatataattttacagaaatttactaaaccatgactctgtagagttttaataatactacctccaaacatcattgcaaacatctagaagaatgaacaaaaatgatcttagatcgacagtatatctgtttgtcttagtttctacacacgatgttcagacatattccatttctttaaaaaaaaaaaaaaaaaaatatatatatatatatatatataggcctggcacggtggctcatgactgtaatcccagcactttgggaggcttaggcaggcaaatcacctgaggtcaggactttgagactggcctgaccaacatggtgaaacctcgtctctattaaaattacaaaaattagccgggcgtggtggcacatgcctgtaatcccagctactcgggaggctgaggcaggagaatcacttgaacctgggaggcagaggttgcagtgagttgagatcacgccattgcactccagccttggtgacaagagtgaaactccgtctcaaaaaaaaaaaaaaaaatatatatatatatatataaaatcccaccaaaagtctgcagagtgaccaaattagagggctctggtttcagattaaattctaaatgtgagaaaccacatagctcccatgatccatccaataattcctcacgtcctcttcactctttactccatgcataaaacagaatttttttttctcatcctgggtatgaagcaattaataatttacggatttagcctatttggattcaatcccttcaaactccatactacatccaaggtggaagtgacttaaactctgatatcaatcatcaggcttgtaatataggctttgttaatggcaggagagtctaataaaactttctgttccttatccttcatttaaatgaaaaactttttattgaaaacaatcataactctagctcatcataaatataattcatgaggacattttattatttttatattaaagaaataatattatagatgtaaactttgcacctttctaattattatcatgagttaagctaatacttgtcttctggtccctagatgatgattcttttttgccttactggaggagcccttgtcttgaagtgagttgcttcaacagcagaggacttctagtttctcccagttgagcctaaagtgaacttttcatcttcttcagaggaaggggcttccttgatttgtacttttgtggctcctcagataacacagacaattttatcttggatcccaggttctcttcaccattaagaataagaaagagagaaaatgctgtgcatgacagccacctactccaaactacccaaccccctgtaaccaggtaccttccaacaacgagatgattctgccctcactcaagagtctcccccacaaagattccattctccctttactttttattttttatttttttgcaaaacaaaggcctcctttagtacctccttagtttataacccttatcttcccagctcttcccttcactgatacctctgatttcaaaagttctgaagtcggaagaccacacaatttcagactgtgaacagaaattcagtcagaaattattggagttagaaagaatttagagaaattgtattgaactagaaagtcctctttgattagtggtggccctttagaaagttctagggcagagtcccatggtgtttcatcttttccatgatttgcttgaccaaaaacttctctttcacaacatgaaaatatgctaatccaccacacattttggattctgctctgtttgcctgaggtgttagatctctagccaggactgtgaagggaaggaacttgaatccttcctattgagctattaatgcagagtcagtgagatgaagggttccactcggggtcaaaatcatgtcagttaccaagcaaaggagcaagtaaggggaaacatctcctcatctggttagtggagccacatttcacccactgatcaagccagacctgagcaatagtctagatttctccctccacatctaattggtgacaatggtgattgtaccactgacaggtcacacaagtccacaccctccttcacagcctcactgcttcggctcttgtttatgctcttatcagcatctgtcactgggatccatttctctcctgactcatctacttcctttcactcccctgggccatccttcacatcatgctagaagactgtgtctaacttgcagaacttattgtgtcaatctcctggttacggcccctccatggctccccacctgacataggagacccttcacaatctggcttctgtcactcataacttgtctccagccttcattcttcagtctgattttatggttttctagttccccaatacaccacaccagtgtttatgaaaccctagtcattggcctacgaactttatgattattgacatattcatgtaccacctgtattattttttgcatagtgtttatttttaattgactacatttttaactacaataaagtaatttcaactaaaacttggtatcaatgctgcgaatggaaaactgctatcagttgccataataaaaatgaaactgtaaaaataaatataataaaaatgaaacaaagttattaagttctaaccagatactgttgcctgctcaaaggtctgagcaataagcctgttctctgtttgacacaaagggagttcagaaagtgttagagagatagaaaatattttggggaagcacagaaagatttattccctgagttagccaggattgagagggagttgatagagcagttacttctatggttttgttcaatgttatttaatgcttgatcctagaatcatcctgcatacaacattcagtcatccacatatctcaggaagcacaatattgtgcttgctacatatccctgcccttgttctgttttactggaactcccttctccattcgtcctcctgacaaacttctttcgccctctctctggataaagagagtttccttctctgggattccttccatgacctatttccaagtttccaggccttgagtgttccttcattgctatctcatagcacgccatacactctccaacacagcattttccatctatctcagaacttgtagttaactgcaactcctccctcagcagaccatccgttcattgaggacagacaaagacactgtcttatttgtgtatgcccactgcctaagacagtgcctggaacgttgtagacactggacatctacagaatgtatccctggcagcgagagactcagttgccataggttggcaagcacatgaggaatctaggggatcatagtgacctttaaagctaagatcaagaaaagagtaacctgtaaattgttacaacaaaatcagaaatgtaggagtagaaccaagcttgctaagtcatggtcaaaaacactataggtcagagttcaaggaatggaggcttcaaagtttagactagattttgcagtgaatgcatgagtactaaatatacctttacgcttgtcttggctccctctccacccaggaacccaagattaaaattaacccttcatttctcttcttcctccttccatcccctctcgcatcttctcaaggtctcaaaaataaagccctctagttgagcattcttcactaggtcaggttgtttttttttctcaacttttattttagattcagaggatacatgtgcaggtttgtttacatgggtacattgtgtgatgctgaggtttgggctacgaatgatgccattcactaggtagcgaacataatacccaacagacagtttttcaaccctttcaccccctagtagtccccagggcctattgttcccatctttatgtccatgagtacccaatgtttagctcccacttataagtgagaacatgcagtatttggctttctgttcctgcattaaagcccttaggataacggcctccagctacatccatgttgcttcaaaggacatgattttgttctttttttaatagctgtgtagtattccatggtatatatgtaccacatttaggtcagccttataaagaagatttccttattgaccgtagcatcaaacccaacctaagtgctcagtcctttgaagaggtacaaagatatccttgcatagaacaagcccacaagttttccagatgtgtgggttgagtaaaacatatgaaatgaacatgccgtataaatcagtgaaatatgtaatttgttattctggatagaatgctgatttgcaagactaagtgttcagggatattttctaggtaattccacttcatacgtaggcacagtataactatttgcaagggagaggaagggcacctaatattaccacagaagtcttcttttcccaatagtttgccagcctgaaaatgtagtcttctttattgattaaaaaaatctgtcaaattgtcaacttaaatgtaaggctttttgtttattggtttacctagtgattctaaagctaactccaaatttagttacccaaagattaaaagaatatagccgtgtggtttttttaagctttcctgtccaatatacaaacccagtttgccacctgctcatcaatggaattttatgtaactttcaactttaaagataattggataggaaatacctacagagctttttgaaaatttcagtgaaacggcatgtccctggcatggagttgatcacacctgcaatccctgccaatctgtgcttgtcagactcagaattagtctcctaggctgcctattcagtgatgcctgaaggtgcccacacctgggatagcagataccacactgctcgtgaccttctaaattccccacctaaagggcagcaggttgacaaccaggttgatagggttaagttttgtgttgccacccaaatctcatcttgaattataatccccaggtgttgagggaaagacctggagggaagtgattggattatgggggtgggggcagtttcccccaggctgttctcatggtagtgagtgatttctcacgaaatctgatggttttataaggggctctcctcccttcactcctcactctgctctcctcccaccttgtggagtaggctgtgtttacttccccttctaccgtgattgtatgttccccgacacctccccagccatgtggaatggtgagccaattagacctctttcctttataaattacccagtctccagtagttctttggattagtgtgagaatggattaatacagtgaattggtaccgcagagagtggggtactgctataaagaagatacttgaaaaggtgtaagcaacttcagaacggggtaacgggcagaggttggaacggtttggagaactcagaagaagacatgtgggagagcttagaacttcctagcgacttgtagaatggttttggcgaaaatgatgatagtgatatgtgcccggcaaggtgtcatagccccagcactgggaagtggttgacacgcgggttggtagaaagaatttaccaacaacagtataggattgaaaaaggaaagtttattagaaaggaagaatgctacaaaagggtgcagcggagcacctcagtgggaggactgagtgtaccacggtggattttttctgaggagcatttatggaccttaaggtagaagcttagggttatgaaatgagttttggcatggcattccagagatgcagagaaattttaattattatactcatccaagttgaaagaggcctggaaccagatgctgactttagatactagggaagtttaattacttcttacttttctagataaggagttttgcctctggatggtctgtttaatagttaccaggtggtatttgctcccttctaaattcctcagacaaggagtttttttctctggggcttgttcaatagtctccaggtgattttgctctcctcattttccctctgacaaatattttggtcaaatctttgaccctttatattcccccatgcctcatgtctacctgctgcctattggggtctcaagaaagggaaaacaccatagtgaagaggggcatcgagtctgtctggctacttgctgctgaaaggggagcactgaaggagataggttgtgtttttccctttcttgttctctgtcacgaaagcaattaagggtcatgaaaaactcgttcaagggtgggggatggggagaaactagattccatcaagaggccccacataaatggaagttactgttgtaggctggtattgggattgcatagtcacctgtaggtggaatctctgtaatctggaagatacaaacttagtaaaagcagtaaaaagtaaggaccaaatatcaaaagaatgacaaggaacaaaggtccaaggaatggaagaagccaagtgatttttggaaaccaatcagtaacaggtttgatccactcttggttactttgataaagtgtatgtaaccatctggcttgtttgaaaatgtcttgaacatcagtctccacttctccagacacattaatgtaggtgcaacaggttttgttgatgacagcacagtctcctcctcattcagctaggaggaaacacagagcttgtctattatcaaaaaccattcctgctagtgagtctaaagacttttgtatcgctgatatacttgcaccaatttttgctaaggctatttcaagggagatggtaagttctagtagtatgattttatggtaagtaaaacctgcccgaggagcaagagttgcaatagtttctacaactctggccacaatatgttctaggcccctttgtcctcttgaatgaaattctgagttggaagttatgttcaggacagcgatttaggtgggagctattgttcctagagtacaatcaccataatgaagagaatgatcaaggtgggtaatattgttagcctttgtgtccccacccacatctcatcttgaattgtaatccctgggcgtttagggagagaagacctggtgagaagtgattggattgtgggaacggttttccccatgctgttctcatgataatgagtgagttttcatgagctctgatggttttataaggggctcttccacttttgcttgccacctgccgcttcgtgaacaaggtgccttactttaccttacaccatgattgtaagtttcctgaggcctccccagacatggaaaactgagtcaaattaaacctttttcctttataaattatccagtctctgatagttctttatagcagtgtgagaacgagccaatacacaggtattgaaatatgaacaacccaggggcttgtacatggttaaatctataaagccggaacatctgtgctccaaagccaggtcagtgctttatttatcttataaactcacagtccaaaagattcatagagagatcctgcctctacaaaaaatttaaaaattagccagtcatggtggtgtgatggattcctcttggtggaatctagtgatgggcctgtggtccaagctactcaggaggatgaagtgggagggtcacttgagcctaggaggtagaagctgcaacgaaccatgatcacatcactgcactccaacctgggcaacagagtgaaaccctgcctcaaaaaacaaacaaaagattcagaataaaccacttagattagtataactcttttctttgaattcacaaattgaggatgtaaaatgatcttgtccacaattactcagccaataaaatgaagacctgaagaggagctgacagctcctcagctattattaggccatgtggctagtcatctttaaagcccctgaagaaaatccagagagtagtaacttcctgctctttcttgctgatactcatgtgtcagcattccatgttggaagctgacaaacattgtgcagctttctctagaatttgcctatgttatggtaaaaggaaaatatggtataaagaacacgagctctgagaccagtgagatctaggcttacatccttcctctttcacttggacaatttgggcaaatttacatccttgagcttcagattcactgtagggtttacatttgatcatttttttatgcaagctttagtacagaatgccatatagtaggtgctcaataaatactatgtcctcctttggggcaattttcttgtgtaggaacactagcttgtctggcaaagagaaagggataggcactgttcctgagcttagcagcctcactgattatggctggtcctgcccttcaagctcccctggggaagccaggcaagaatgtgtgtcatcaggaagctggggtccaggctctgctgccaggatggaggcccattttattccccctgctacctcaaaacataagagtacaaacttactcagaaccgagttagcccagtagaacagatgtttcattttccttgagaacaaaacaattttatgaattcagaaatggaaataatagtttgcttcatctaattagcaggagctaatttagatttcaaggtcattgtgtacggtgtcctcctccttcacatgcccagcactttggctctactccctccctgcttctgtgattcagcatccatgcacacaccataaacaatcacaatttccattttaggatttggtctcctggtgctgtgctacagcccccgtttttaggaaattggtgcttggcaaacgatgaaaagtttcacagaatatgaaggttatggcacagttttctcctgcctcatggcttaatttaattaagtattctgtaatagctctgcagcagacttgtgctgcggaatgggctccaatttgccctatggcaactgcaggagcagagcaactataagatatgcaagatgactcatcagctgttggaaaatgcagtgaaacctttgccttttcaacaggatcaggcaaggggactgagacagcatccctgggaatagacacctggtaactcagcatctacaagatcattttaaaacatgcttacagtagagtaatcagcaaaaccactgtctgaccttgaaattattctatggctgctggaccttgaagacactgatggaagcagctaagtccagctgtctggaactttgatcaactatgtctgcccccctcagtgtagccaagacctcccttacagcaggttctctagggcaggaggtgtaagcagagaagtcaggagaccaagatgctctttcttattgtggcagataccgagtaacctcatgcctttgcaggctttcggctgtgagcaaattctgatatttattatccttactggggacactcagcttcacagattttgtttttcaaacatgaaaaaagaaaaaatcgaggccctgaagtcacagaatgttttggcagctatgttcaggcttgatagaaaggcatccccatggggacgtagcttttgtctggttccgtttaatttgctatcttcagaagggaaagatggagagataaccggttgggtggggctatgtgatggagattttctgttaagatggaaatgaggggagctttaggtaagtgacagatgacttcccaagaaactgcatgtaactagtcatgaacaacgttgcaatctaagacacaagtgacagaggtggcctaggaggcaatgctcacatgtagtcagtttgtacagccatattcccttgcaaggttgtaaaggggaccactctgtattactgctcatagccatggctacgctgtctgcctattagatgtttaagattttttttttttttttttttttttttttttttgagacggagtctcgctctgtcatccaggctggagtacagtggcaccatctcggctcactgcaagctctgcctcccggattcacgacattctcctgcctcagcctcccaagtagctgggactacaggcgcccgccaccatgcccggctaatttttttgtatttttagtagagacggggtttcaccgtgttatccaggatggtctcgatctcctgacctcgtgatccgcccgcctcagcctcccaaagtgctgggattacaggcttgagccaccgcacccggccaagatgtttaagaattaatctccagcatttcctgcagcccttccaaaattgatcctccaagaagattcatgcaaacctcattcatttactcaaagctcattctttcattcaacaaacttacactgagtatgtgtgataggcacaacactgggctaagagtcggggatgcaaagagtaaaatgtaaaatgtatcttatttaaactcatctaatccttctaagagaatacattctagtgctggagattgacacataaactacagcaatgtgttctggatactgacacataaactacagctgaggaggttgtgcttccgtgaaaagaacataagatttagaatccttagtcctatgtttattaccaacttcacccataggtgcatgtaaacctaaccttgacatattactaaacatcttggagcctagtttatctacctataagagttgaacaatcttaaaaggatattgtgatggttaggatatataaatatatatatcagtgtatatatataatgatcatatcttatatatatcacatataaataggattatgaaggttatggcacagttttctcctggcttaaggcttactttaattagatattctgtaatagctcagcagcagaattgcactgcagatatatatatacataaatataatattaggttggtgcaaaagtaatcacagcaaaactggccatgtgaatatatataacagagcaattgctcagttaatagttttaatgaaaatttaaaggtccagtgatgataatatcacaaagtgccacaaaagcacagaagaggcaactactgtctgagggttataatttcgctaggtttgaaaagaattgttgctcacccaaccaagaatggggtaaatgttattaccgcaaattatttttcatgagaaaatgcccagagaagtggaagagcagggtcttttcaagtaggtgtggtggtaggtagaattagaagtggattcaaatatagggctgatgtagctaactgggactaaattttggagtaagttcattgtgtccaccctggaggcaattaataagcatgttcagaaatgggatttataaaattgattctggagaccaggatgctaaggcaatggagtagagagggagtgggagagagcaagatggaatttagaaggtgaaggtaatgttgtacatgagtgatgatggcctgaatctaatatggattcgtggcaaagaagatggagagtagaaaatggagtggggaggaatttatgaggtggagagaaagccctgatgactaagtggacgtgtggtatgaggtggtagaggatccaaggatgtcattgagcctgggctttggaaaggttgccaacatctattctaagaagttggagaaaacactcttcatgcacttatagaagtccaagaggtaggggctgagacaagcccaacaccctattcattggctcagtcagatcctgatagtagctgtgggctattcatgttgtactgtgctagcattgcatggatatcatcacctaatctttagagcaatgctatgaaacaggtattatcattctcatactattcatgaggaaactgaggctcagctgtgttaggaatctaattgcatacaacgagcaacccttggagttggaaatcaaccgagatttgcctgataccaaaggccctgatcttcaccacttccctctatctgttcctcctatagagatgtctaccacataggactcataaagaggatcacctttttaagtgaagctcatgcctctccaccatcatagattatttcccttggtgtaacatgggagaacaaattctgactgaagccaggttgtctctctctttttaaaattacttatttatttttaatttttaatttttgtgggtacatagtaggtgtatatatttctcttttaagttatttataatagcaacatttgacgtagggataaaactcactgtccccattatctgtattcattcattcactcatttaccagccaccatcagttggtagcattccaccaatgctttctgctctcctggcactgtgccaggctctgtgtccactatttcaagatttatttttttaatttttatttatttatttttcagacagactcatgctgttgcctacgctggagtgcagtggcatgatctcagtctactgcaacctccacctcccaggtcccagtgattctcatgcttcagcctcccgagtagctgggactacaggtgtttaccaccacaccaggataattttttgtatttttggtagagacggggttttcctatcttggacaggttggtcttgaactcctggcctcaagtgatctgcctaccttggcctcccaaagtgctgggattacaggtgtgagccaccgcgcccagcttgaagatttctaaggtgtttctggaaagttaccctgctgactgtcctcatcttaccatcttttatggaaaaacatttccctcttggcattctgggagttcatagaggaatgaaacctttccatgttcctccatttctgacattgttggaaacgttgcaggttttatgttttgttttgttttgagacagagtttctctcttcttgcacaggctggagtgcaatggcatgatctcggctcaccgcaacctccacctcctgggttcaatatattctcctgcctcagcctcccaaatagctgggattacaggcatgcgctgccacgcccagctaattttgtatttttagcagagacggggtttctccatgttggtcaggatggtcttgaactcccaacctcaggtgatctgcccacctcagcctcccaaagtgctgggattacaggcgtgagccaccatgcccggtaggtcatttttaacttaacatttgaggagctgtgttgacacatgtcctacccatcagtcttcagggaaattaaggttttaatttcaatccagcctaaacaggtagtggtaaactctccacatcagggaggaccaggctggcctgccagtgggttaggatgcttcaggtgtgactgtttcatctacggaatatggtggtttgcagaataagtgttactggatagttctggtcacccagatactcatgcctactttgcaaattagatttactcccaaagtgagcgtactaatggaaagcagtttgtatggctatcaaaatacagtcactactacagacaacagggtaagcctgcccatcatgaatgaaaaatcacagacctcagagttgaagatcagagggtagctaaaactttcttcactctaaattgatagaatttttctacaaaaatcagatcattgcttttctcttaggttttcaaattatctgttgcagcatgcaccacattatattatattcacatttatggctgacttccagctagttgtgagctcatagattttagagattatgctgggttcacctttagccctaatgcttagcactatgcctggaacttagaggatcttaataaatatcattcagagctactactttatttatcattgttaacagggaagatcataggactctacagaaaaaaaaaaaaaacaaaatcttaattcattcaaggtccttctctgtactagtcttaaccaagatgaatggtaaaagaatatgtttgcagcagggtggagtggatagttttataaatgaagatggattataatattatgatactgttgttttattatatatctatcataaaagaaaataatcttactaaagaataatctttggtcctttcaattaatgtaatggagactctcaatttagctggaagagagattcagtcttgcctgggcatgtctctggaattggtgggagcagctgccagaggctgtttgcatatggattgaaggtcctcttgggagagttctcattctgaaggaagaagttgcctggcaacaagagtttgacccatagagacagccttacccaacagaggagcaaggaagcctgactactgtgtgatgtctgtcacctagatccccctcccagcaggatgacaatttatacctaggagctatagagagtagagggtttgaatgtacaaagtgggggaaaataaacttgcattactaatcttttttaaaagagtggagtacaatgccatgtttcaggatctatgtgataaactgaaacataaatagaagggaagcatccctgcttttttttttttttttttttaactaaaaacagtttgggtatggtaatgtcaccaaagcattcatgacaatgcatggcaaaccagcaacagtaccaggaggaagactttgaagcccagtagagcatgaaggatagacccctgtaggatatgatagtatccagatgatactcattggaacatggatacacctagaatagagtagcagacagagtgacaaagtgatactcagcagaggactgagggggaacagttgcacccagtggaacagtgagtggatggaaaataatggtactagggggtggatgtgaagcagcatctttgtctgggataatacctgaggttcgtggtctcacgccaagaagattgaggacacggacacacacacacgaatgagtttagaagctgaggtttaataggcaaaagaaagagaaaggaaaacagctctctctctgagagagagagagagagagagagagagagagcgcgagccgccccagtgggaatcccagcctgcctaccgagtgcaccagattttatacagaggcttgaggaggtggtgtctgatttatgaagggcctacagattgattggaccagttgtgacgtttatatagagcgtggggaaggctggctgccccactccaatcttattatgcacatggacttttcacttggctggcgccatgttgtctgcttcttactgtacacttggctggaaaggagaagggaagacggagccacaattttgaacatgcctattcccaggcagccttttcctactggcacagctgctggcattcacctgtgcaaggttctagcttgcttgtctatgtctgcagctggattttacaggctgttctttgttagaaaagaaaatgatttgggggctgcttttcattaaaaggaaaaccttaccctcactatctgcctaaatgatttcttcttaactcctgtatcagatgttgatgtcaaagggggagccatcaaaggattttagagctctactataagcctaattgaactaacaactgctactggacttaacgagatcatgaatctctagtccaggatgttagaaagcctgcatcccatggccgtgcacaaaaagtcactgatagttaacttttcttttccaaatggaatttttttttgttcaatgtggtgctttctttaaataaattctttcacaaactgaggaatcctacattaattcaaatatttaattcatatgcatgtgttttctccaatttagtcccacagggaattcagttagcttataagaatgcaaacactttagcaagttttaacaaattcagaacaagtgaaacaactacacttaatctctctctactttatttaaactttaaattgggatttcagctatagcattagtataagatgtatgtgaatttttgtttccatagcttccaagctctttggctgttcagtatagtgtttatcataacccccactattgggtgagaaaagccaatttaagagactgagatgctaacactcaaagagggcaaatgacttcactgagttgtacccaaaattgctgtcttttcctaacaggttttttttcttcatttccttcttttgcctgatcaaataacacagagaaagtggtcctatttagtaagttgaaatacctctctgatacccaatgcaatacccaataagtgtacattgtgccttatggaattgacagatcgctgcgagggccaggtgaggcagtgactgagctgcccaaaacaagtgtcagtgagtggccacattgattttaagagcctatcaagtaagcataaattaatcatgaaaacaatcaagtttaaatttcagcttgtttggagtaccaatccttgataaaaaaggggtgggataatattttttccttgacacttgggcttcccattgaacttgagttactttccacctaaggggaagtgttatgcatttttggaacagaacccagatcaatgcaatatagagtgtattctttttattggtgttgtactctttattgtcaatcctggaataccagatctagaaataaaatgggagtagaattagaaggaaactagaatgatcaaattccatctgtataacaggtaatgtcatacagtattttattttgtgtgtataattttgagctttatctattatttatttattttgagacagggtcttgctttgtctcccaggctgcagtgcagtggcatgatcatggctcactgcagtctcgacctctagagctcaagcaatcctcccaccagagtagctgggatcacaggcatgtgccaccacacctggctaagttttcgttttgcttgatggggatgggttttcaccatgtttcccaggctggtcttgaactcctaggctcaagtgatctgcccatcttggccttccaaagtgctgggattacaggtgtgagccccaagctttactattttatctcttcataagctactccaaaggttagtgacatgtattacccggtaatttttgaatcacaaatgtcaacactttcagggtttgcaggaaccctccagctgatgagtgagattaatcagagcccaccatccacatttcagtgatttcgttctatttatgtttgcatagcattttataatataaattacatgttctaatagtattttaaaatttgactatacctgaagtgctctgaatatatctttcaaaaacgtcaagactatatggaactatggaactatcaaaaagatgtctgaggttgaagccacccgccttttattttattttattttatttttttgagactgagtctcactctgtcacccagcctggaatggagtggcgccatctgggttcactgcaacctccgcctcctgggttcaagggattcctgtgtcagcctcctgagtagctgggactacaggcatgctccaccatgcccggctaattttttatatatttttttttcatagagatggggttttaccatattggccaggctggttttgaactcctgacttcaagcgatctgcccaccttggccacccaaagtgttgggattacaggtgtgagtcactgcacccagccaaagctaccctcttaataggagttggagtttatgtctgtttgcttcctaagaccacactctttatatcaaaatgtgctacctgcttggaggtatttttgcatattatgttcaagtttatgagcaaaataattttaaactctgcttacagtaaagtagttagcaaaaccactgtctgaccttgaacttattttgaaggatgttttagttgatgggaccttaaatcactgttagaggtggctacacccaccatctggcaatatgaaaagcaatttttgccttgcaaagtgaggtcaggatctaagccaagagacaacttgtccagggcacaaggcccaaaaagagcaatcaggagacagagatgttcttccttatctggtaaatgtgagatatctcatactttgagttagggatcaattcagatacacccagattctgacttcaacatcctgccatggcagtcaaacgatactctaaggttaacatttttaaagttgtttttcttgtttttttgttttttgtttttttgagacaggatctcactctgtcgtccaggctggaatgcggtgctgcacctgtagctcactgtaacttcaaacccctgggctcaagagatcctaccacatcagcctcccatacaactgggactacaggtgcatgccaccatggccagctaatattttttttagtagagacagggccttgctacgttgtcccacctggtcttgaactcctggcctcttgaagctatcctcccagcttggcctcccaaggcacggggattacaggtgtgagccaccattcctgaccccaaagttatttttctgaaaggaaaacaaagattacccttagagagtttagggtagcttttcaataattagctactcttgaagatgactgacattctctcaaatgccatttcctcatctttcccatgtctgtcagtcacattattataacatagataactggtgtggggggaatcttactggtgatagtccagtgctctttatgacacattcacttctctaacccatggagacttccataggatgctcagtgttatcctagatcacaggtgtccctgtcctgatgtcaggttaatgaaggtggcttgtggacttggatatttctgggaaattttacaaggggtaactaaagtaaaagagaaagaaatgcagaaaaatagaaacagaaattctcaccatagaagcttcattatgtatttgcaagatattcacacactctagattttctaagacagttctgaagttaaatcaccttattcttaaaaatatgatggattatgcttatgtttatttaagtgtatatacatctgtgttgggtattcatgtgtaacattttagagctcatattttcatggctgtctagttttctttttcttttttttttttttttttgagacggagtcttgctcttgtcaaccacgctggagtgcagtgatgtgatcttggctcactgcaacctccgcctcctgggttcaagcgattctcctgcctcagcctcccacgtagctgggattacaggcacccaccaccatgcctggctaatttttttgtatttttagtagagacagggtttcaccatgttggccaggccagtctcgaactcctgacctcaggtaatctgcctgccttggcctcccaaactgctgggattacaaatgtgagccaccatgcccggcctgttttttaagagacagagccttgctgtgacacccaggatggagtccagtagggaaatcgtagctcactgcagactcaaattcctgggctcaagtgatcctcccacctcagtctcctgagtagctgggacaacagtcatgcaccaccatgcctggctaatgtatttgtttattttttgtagagatagggtcttgcttaattgcccaagctggtcttgaactcctggcttcaagtgattttcctgccttgacctcccaaattgctgggattacaggcgtgagccactgcattcagcctgctctctagttgaatgacttcaggcaagatactcaacctctttgatcctaggtttcttccttattacagcatggagactactacctaggtaatatggttatcgtgaagagcaaatgagaatcagactaagcacattgtagatattcaacaagtttacacatttgaaaatgtccagaaggaaatttatcacaagtacttgtcttcattggatagtgagactatgaatgcgtggcatgtgtatcccaggctttcctagcttgccaacacaagtgacaactaatttatgttaacaacactaatggaaacttagtgaatgcttactatcagccaggcaccctgctaagctctcctcatggattatctcagagatcaaccagatcttactggcttgtgtcctcagctagttgatcaaaatttagttttatccagatcccaaatattttggagacttcccagtgacatatttacatgtccttaaatcatttttctccaaattctacttgaccatttgaaaatggatatatgatcctcaaagctagatcaatgcccagtagttttccttttttcctaactcctaatgggtgctgatttcatggagtcaggagcccctgatagtttgaggtttctaaagtactgctgcagccaaggttaagcctgggatttggcctcgctcactattaacaactgataataaaatgcaatcagaaatccccaatgtttctgttgaaggatccagaattctagcaaccctaagatattgctgctgttgtgctggggattggtagtccaagccccagccatcccaccaggttgtagctgcagttgaaaagtccactcctaaggtctgttacacccaggaaatcagtgtctgggtccaaaggatcattggtggtacacttcttttagctcatgaacacacacaccccatgcatacacttaggcaaatggtgcacacacacacaaacacacatacaccatgggcatgttccccaaccccacacatagttcaaaggaagatgggttaaaatttatctgtgcttaccttgtaactgattctagattacttagttctgagcttatgtgttgctttcaggccttcttggtctgttccatttgctattccagcaactgacttcctttcaggggtttcactgcctttttcagtgacccctcctgggctgggcctacatagcccatgagacatagattttaccctgttaattttttaacatagttggaatcactatcccattccatatttcaccaggggaatccctagttccctatgtaaatatcaggatgtacatggatgcttgcagaggtgagaagggtgctccccagtttcagtcaccagctgcaccaatatcccaaaggcagatgcatgtgttaaataaaaagtaatgacaactaacagtgaagattctttatttttgaagcatttttcttgtgataaaaaaatagcgactcttatcatagcttaggcctgatttttacaattttaactgaaggttgggtggctctgtggctcatgcctgtaatcctagcactttgggtggctgaggcaggaggatcacttgagcccagcagtttgagaccagcctgggtaacatagtgagaccgtttctaccaaaaacttgaaaattagccaggcatggtagcacgcacctgtagtcccagcaactcaagaggctgagatgggaagattgcttgagcccaggaggttcaggctgcagtgagccatgattgtgctacttcactccagcctgagtgacagagcgagaccctgtcttaaaaaaaaaaaaatagccactgagtttaatcataagagggtatggaaattcacactctcactttggtgcattgggaaaaaagctctctaacctactccattaccataaacagagaatccgttcctctggtatgtttcaaatgatcttacattatcaatggattgattaacctcagtaatgatttgttggacggccactattaataataaagacttttaaataactccttgtttcaaaataattattttttcacctttattataattatataaagaagatgtacccattttatgagtacatttcagtgagttgtgacaaatgttagcacctgtccaattatctccctagtcaagttctatagcattgctgtcactccctatcttagtccattcaggctgctataagaaactaccataaactaggtagcttataaacacagtttctctcagttctggaggctgggaagtccaaaaactgggtgctggcatggttgggttctgatgagaaccctcttctgggttgcacactgttgacttctcaaatggcagaagggccaaggcagcttttggagtctctcttacaagggcattaatctcattaacagggctctgtactcatgacctaatcactgcccaaaggccctacctcttaatgctttcactttggggatttggtttcaacatatgaatttggtagtgaggggtgggccgggcacagccattcataatatagcacctcccaggccaggcgcagtggctcatacctgtaatcccagcactttgggaggccaggacaggtggatcacttgaggtcaggagttcgggaccagcctggccaacatggagaaaccccgtctctactaaaaatataaaaattagacaggcatggtggtgggtgcctgtaatcccagctactccagaggctgaggcataagaattgcttgaacctgggaggcagaggttgcagtgagccgagatcatgccactgcactccagcactccagcttgggtgacagagcaagactctgtctcaaaaaaaaaaaaagtaaacaaatatatatgtatatatggcactgcccaaatccccctattaacctgtcatctaggttttaagctctgcgtgcattaggtatttgtcctaatgctctcccttcccttccccccaaccgcctgacagacctggtgtgtgatgttcccctctctgtgtccatgtgttctcattgttcaactcatttgcagtcagtctctcctaagcacatccactaatattatttctattactgtagattggttttgcctattgtagagtgtcacagatatggactcatacatgaagtatcctgtatttggtgtctttaattcagcataatgttgttgatatccattcatgtgtttgtgtatgttaatagttcatcccttttattgcagagtagtattttcttgtgtagatacaccacagtttgtctatccattcatctggtgatggacatttgcactgctttccacttttcagaagctgctgtgagcattcacatgcaagtctttttgtggacatatatttgcattttaaaaatacctaggggtgaaaccctaagtcctgtggcacatgaatgtttaacttgaaaaacactgccaaattgttttcaaaagtaactgtgtaattttacacttaccagcctggtaggacagttccaatttcttatcagcacttattattgtcagttttgtttaaaaaaaaattctagaaagtatatagtagtattatgtggttttaatttgcatttacctaatgatactgaacgtctttccatgggtttatttgccaccaatatcttttttttttttttacaactctcaattttacttcaacaattacctggatatcaagtgcttgaataaaacttttagtaatatttaaatgtttcagatacaatttgtcttataaatttacatatagaaaattataattttgcattctattttctggaagatttttctttttccaataaattttttttttggggggatacgtttgtagaatgtgaaggttcattacataggtatacatgtgccatggtggtttgctgcacctattaacccgtcgtctaggttttaagcccggggtgcattaggtatttgtcctaatgctctcccttcccttccccccgaccccgtgacaggcctggtgtgtggtaatcccctccctgtgtccatgtgttctcattgttcaactcccacttatgagtgagaacatgcggtgtttggttttctgttcctgtgttagtttgctgagtgatggcttccagcttcatccatgtccctgcaaaggacatgaactcattcttttttagggctgcatagtattccatggtatatatgtgccacattttatttatctggtctatcattgatgggcatttgggttggttccaagtctttgctattttaaatagcgctgcaataaacatacgtatgcatgtgtctttatactagagtggtttataatcctttggggatatacccagtaatgggattgctggctcaaatggtatttctggttctagatccttgacaagtcgccacactgtcttccacagctgccaccaatatcttatacatggtgaagtctattcaaatcttttgcctacttaaaaaattggaatgtttagttcttgtattcagttgtaagagttctttatatattgtagatacaagtcttttgtgagcatataaattagagctatcccctcctcacaaagtaatgacagttttgttatttaagcctcatagcaaaaatactacatacagctaatttatgtttaatcttttttatatttccaaaatgtatataatagaagatattaactttattttttaaaaaagaaaaactgatcatcagacctttgtttccacactttgcttcaaaaagtgtgcttagaatacatatatgacttacctagagtttttttttgtaatacccgccagtccagaaatagaggtggagaaagaaagatgacttcccagcaaagctttgacatatgcaaaatgtaacttgaagatgcagtatctctttttttttttttcttggctccctaatgtgatgtgccccttccccaagtgctcctatcccagaagagtttaagcaggcttctttccagggttgttattgtatttttttggatctatcaaaagatttatagcagcagcaaggccaaatgaaggaggaatttgtgggtctgaggggccttactgagaggccctgaggtaacactatattgtaatggttcaccttacttacctttaaagaaggttttaaaaagagtaaatcagagctgggtgagttaatgttagtgaaggaatacagcagctctgtcacatgggctccttttgtaggaggtatccttaggcttcgtttaatttcgaattggtatgcaaccaagagtgcctcctgcatctctgagtgtctccactgtggagtgccctggtggctcatgagaatgcattaaggggcaatccaggtgggtggcaagacaaggcaggactgttcacactacctctcttgccccatcactttacagcattcttgtaccatcttatttttctccagtgacataaagagcactctgccttgctttgtcaactactgaagccttgtaatacctatcaagacaataagtgagggagagcatttgaggagctagagaagagagctgaaggaaaacagctactaaatttagtaagagaactggtgtgacttacatgagatatagaaaacaggcaaacccatagaagcagagagcagaatggttgttgccagcagctgggggacaggggtaaatggggagttgctattcagtgggtataaagtttcagttgtacaagataattgagttatagaaatctgccatacaacattgtgcctacatttaacaacattgtatgataaatacagcattatcaatatattgaaaataaagacagtagagctcatgtttagtgttcttaccacaatagagagagagagagagagagacagagagaggggagagtgagatataaagagagcttttccaggttttagtttgtgagacatgatttgcttttttaattggagtttgggatgaagaagaggaaatttggggttcctgccaacgtatgagagaagaaaaaaatagcaaaatggaaaaaaagataattttaagaagatcttcatgagtgtgcataaattatgattcctttttgacctgtctaaaggcttgatttgcttttctattactttctagttccagggtggtgttactttgtgtgcagttatgatactgagtggtggttcatgtttatacagtttgtacttggaagccatgagggtgtgagattctttgggaagacacatctcacttttatctaagaagttttgaaaggatgccaatgttgagttaaaagataacccctactgtgggagtatgtgtcagtgatttcctcactcagagttcttaggaccaaattaaactccaggagatggtcatgtcacttgttgaaatctcaggcactcttatcaggacctcttaacctccctatggttggagcatcttctactgacttatttaaggttattagtaggaccattttttggaaagatgtcctgcaattcaacatgtttgtaatgagacataccaactctgagtcatcacataatggagatttccagaataattggagagaatttgggttcctgtcagttagatagtatttgattctgtagaaggagctgactcttgctgctatggtttcaatgtgttccccaaagttcatgtgccggagatctaatccccaatgcaaccatgttgggagatggggtagcctagtaagaagtgattaggccaggaggtctgtgttcatgaatggattaatgttatcataggagtgggtttgttagcatgagtgagtttttgtaaaagtttggccctctcttgctttctcactgtctccctcccttaccctccaaccttccaccatgattgacacagcatagaggcccttgccagatgccagtgccatgctcttggacttctcaacctctagaaccatgtgtcaaataaatctctgtttgtaaattaaccagtctgtggtattctgttatggcaacaaaaaacagactaagacacctgtggagagtacagattgattatggatgaactatctctacccgtagagaacaagacagaagcagtagcagtcgctggtttagaatgtgtatcaggcactgttgggttttgcccaaagctcctctgatctcttttcagcactgtggtcctatgccccggtccttgctgctaatggctaatagctaatggtatctatttgcaacttccagaacattgctctgtgggagtttgctttcagattccctttccactttgtgttggttcatagccaatgactgaatgtcacgggagtaaaataacccagctcctggaacagcaaactccagggttgaatttatgctagtggtctctgtgagagcaggctgaggctggagtttcaggatcacaccttgtttggtttcatctttccttactctgcttttctggctccctttttgatttcttctggaagctctccctcaataaattactgcacctaaatttctgactcagtgtttcctcctgggacaacacaactataaccagaatggtgaatgtcttggagatattgaaaaaagccagcagaaaatataagctgtttgttgttgctgttcttgtatcggtgtctcatgggcagtatgtgtccacagtcgtatagaattgtcgattttcaaggtttcgtggcgactctgtccaaaagaactgacaaataatcacaattaacctggctctgccatgtaagcatagttactaacagtccactgtttaaattttgaaagcaaagattatgcattatataatttaagagaatcttgttttgagactgagccaaagtaacacaatttattatatcttaggattataaagaaagaaaatgtaacaaatacatggaagataggatgcctaagattgagaagacttcagttcttatttgaccattttaggaatgcatgtgatatctcaagtttaagaacttaaaacagaactaccatttgaaacaacaatcccgttactgggtatatacctaaaggaatagaaatcgttctaccataaagacacatgtacatcacagcactatttccgatagcagagacatggaagcaacccaaatgcccatcagtggttagactaggtaaagaaaatgtggttcatacacaccatggaccactgcacagccataaaaagaacaaaatcatatcctttgcagcaacatggatggagctggaagtcattatcctaagccaactaacgcaggagcagaaaaccaaatcccacattttctcacttataagcaggagctgaacattgagtacacgtggacacaaagaagggaacagtagacactagggcctacttgagattggagagtggagaaggataggtacctattgggtacctatgctcattaagtgagtaacaaaataatatgtacaccaaacctctgtgacacagaatttacccatataacaaacctacacatgtaccctctgaacctaaaataagttgaaaagaaaaaaaaatgtaaaccagtaccaattatcacactgaaaacaaaatcttttgtaaacattgtaacactaataaaacttgaaggtaaacaagaaatagatttgtctcttcttattaagaatttcatcctactgagattcacaaacacactaatatattaccttatcttctaatgacttcagggataatgattttatatatacatataggattgttattgttgtgagagggaaggaagttaagtaagagcaatagcttagtttttgaaataaaagtttacaatgtttttactcctggtaaagagaagttttggaagaatcactggacttatttatatcgataattctaaattatctttgttatctgaaaagtaaatagttgttatttaagcattaaaataaaaagcaaatgcaagcttctttatgatttaatctagtgaatagttaccaccttcctgggtatagtaactgattcattttttactctaaatgaagaggcagtttctgctggagagaattactggttcatcatattacatgggaaaacacagtctgggaattgaaggacacttagcataattttgagaacttaactgtgcaccagataatacgtggaaaaaggactcaattatattaaaatttaatcgctcttgtagaaatcttcgctatatgcctagcaactgaagaatgatactaaaaaatatgataaggtcattaactgacatatttgccaagaattctaatgagatgggaataaatgatcaaactatattacatttttaatgtaaaatattttactatctaatattttaatattaaaaaagtaaacatgtactctcaatcatatatattaaatatgcatggaaaatatggtattatgatacttcataaagaatattaatgagtattctttgatggtagaatcttaagtgatgcttattttcctctttatatgtttgtgtctctttaaaattttctacaataaacatccattcataattataaaaataaacacttttatggaaaaaactcagttctatcagatatagctaggtgggtttgaggctggagcaaaacttgagcaagactgtttctcctgccattttgtaattttgtatccaatgttggagtctcagctttctgagagcagacatcactgtgttgcatatgactggtatgtggcaggcagtccatagataagtgttaaatgaatgaataaataaaaatgatgaggagcaaagatgggcaaccaacttaaagaagcaacatgtggaagtaaatgaaattggtaaatatcaatgtggaaatgaaaaaccacagataattcagcaaggttgcagtgtaggcagttagagggctggggtaggaaatgctgtctcagtctctgcattacagtgtcttattgtccctatgacatcctgccaaatgcttattttcccccccattttctagatgagaactgagttttcctaagcttaagtgatttgttcaaagttgcaacattgttaagtaaaattcagatttgaacccagctctatcctgcttccaaggagccttcttgttcccctgcactgcagagacagaggtctggaaacctgtgtaagcagataggctcttgcaggtaacagaatgccattgagttttgagaagaggaatgacgggatttgtagggcatgaagctgagccaaggggcaaatcactcatctcatttctcccttccagtatctcttatgttacctttacagtacctgaactcccacccttcttgcccctttgggttaaggttcagaagagcttgggtaaaatgctattgttacctaggaagggtatcccaaggcatgaataagttttcagtatgcattatcagagggtaaacccctgaaggaagtggacacatttctttttttttaaattcaataatcctttatggaatacttactgtgtgccattcactgtctagatttttgatacacaccatgaatgagaccgatactatctctgcctttttagaatgatggcctaagaagcagaagtgatcatttttgttgcatatgggagaaggtagacaaaaagtttgaaaaggtaaagtgatgatgcaaacagagtccaggtagggaagagaatccactatggaagccaggcattacagaggctcacatggtggcctgagaaagggaggaactcggacagggagcttggagatcctgtatttcacagtggagctgtcctcccatccttaaaacggcgtgacaacatcacgtttcctctctagataacctcagtctagggaagggattaacacagtagaactatagcatgaatcttgcctgcaagagaaaaatgagctttgaatcattaacaagggaattgctgctacatactaatgatgctatttcccggccctggtctttttacattaatgcaccctatggtgtgaactgaatgatataaaactgattacaggctttggagatatttctggttttgattgttttatgtcatgcaccacttgtttagattatgaattaactaatctgcgttactccctaagttttaagattgaaaagcccttactcctttctctgataccaaattaatataactatctctgatgacagccaatgaagactaaacaatagccattcgtgtgatttacttcacacacacagggtccccacaactcccacccatcttttctaatgattgagagaatgtctccagtattacgaataatttattctagactcaatgtcatttatcttagcttgtagcagcctgccttgtgcaccttagactcaacaaatatttatttaatttataatttttcatatattttgatctattttgaggaatctagccgaacataacaattctaaataggacaaaaaaataaaattatactaaaggatatttaccatatcttaagatacaggaaacagtacagtgtctttcctagtctagctcacacaccactcaacacttctgacactaaaatgagtgtgcaatgagagataggtaaaccgaactgattttttttccctactcgcttacaaagccactcatatgacacagaatgcttctgtgaccagatgtgtgggggggttttctcctcacaccaaccaactggatgttctataattcaatttaattctgatgctatttgcctgaagatagtgtcagatccaacacgttaaaggcaaagatgctagttacaagtagtaggttgtcacctatacttctgactgaccagctggctataaactggggctcccatcactcactccttggattcaattaatttgctaaagtgactggtagaatgcagggaggtgccttacttacgttaaccgacttataaaggattttacaagggatgcagatggatgccagatgaagagatggatacgttaaggtatggaggaaggggcacagaactcctgggtctctctgcaggtgcatcaccctttaggagtctccatgtgttcagctatccagaagctctcagaacccagtgcttttgcttttttatagaggcttcattaccaaggcaagattgattacaacattgatcactggtaattaatttaaccattagcacttctctccctggaggtcaaggggatgaggctgaaagtcccagttctctaatcatgctgtggtctttctagtgaccagcctccatcctgaagctatctagggtctcccagctactagtcatctcattagcatacagaaaacactcctaacactcaggagattccaaagagccatgtgtcaggaactggagataaagatcaaatatatatatttcacagtgtcacaccatagtattatggagatggagatcaaatatgtatttcacaatgtcacaccatagtattatgtatggtataaaaaaaggaaagactctaagcatctaaatatgctaatataggaaattattaaaataagtagggcttttcaaatgatgaaacaatatacagccatgtaattttttttgcaataacagggaaagatggtgatgccaaggcattatgcaagaaaactgggggcagattttattaacattattacaattttgtaaaacatatgtagaaatcttagaaagtatgctaaagtgaaaagagtggttttctttggataatgataccatgagcaataatttttttatttgaaataggtttttccaaattggaaaaactattcttgaaaaaatttttctatacttatccaatcatcaatcatatgcttgtttgagggaaaattatgcaaattcctctaaaagtctgttgtagctatgaagcccagaaaactggaagaatttctgggcaatggcaagtcagtgctgatacctttccctaactaagaaatgtctcaaacatgggtcactctacgggacactggaaattccctacaccactctgagaggctgactactgatctttgctgacacttcaaatggtattagaaagtggactgggctcaggattagaggtacatacttatgtcgagagcagatgagaatcactctactccttaggaagggcttcaggttatgcctgtaatcccagcattttggaaagctgaggtgggtggatcatttgaggccaggagttccgaaccagcctgaccaacatggtgaaaccccatctccacttaaaaaaaaaaaaaaaaaaaaaaggaaaataaaaaattatccaggcttggtggtgcacacttgtaatcccagctactcgggacgccaaggcaggagaatcacttgaactcaggaggtgaaggttgcagtgagccgagatcatgctgctgcactccagactggtaacaaagtaggactctgtctcaaaaaaaaaagaaaagaaaaaaagggcttcaggaatcacagagctagcttatgattctgttcttttcagacagctggttagtggtaaaataatgctccctctcctgactcctaattcagttctacttccaacacattaagttgaaccctatgaaattgccatatttgtagatcaaaatggtaaaataatatgaattttgtttggttcaaccacataggcttgctcaccttgatgcaatttatagaaattttttttaaaaagagtttcctttcaaatcaaagcaaaacaaatttatacttttaatgatgcctgaattttttaaagagacaaacttccctacataatcaatgttctgattcctaaatcagaccttcggtgtaaaaagagaaagtcccaagtaaaagtgatacatttacttatactgtgtaaatgacttaaagtaaaccctttcctagaggtcaggttaagcagaaaaacattgagttcctgaaaggctggataaaaaatagaataggaaataaatatatattcaaatattacttgataccgagctagtcattttcataactgtcattgtatttagccccttccaatgtctttttgagctaaatattatcatccttttttctaatgggtaaactgaagtagcctgaggttaactaaattgtccaaagtgactctgatggccgaatactccacatcatgatttttttccctatatcttactgcatccataagaattgttgcaaggcttatatattcttttctaattaaaaaaagtactctttctgattaatgtattaacttggattggtttcaaatttcacagtggtaaaagacatatagtttaaagtcctgtcaaatcttcagaagccggtcatagtgtgtaacaaagctataagattttctctcctgtttccgtttccgtttttttttttttttttttttttggcttccaatttagtttctcctccaactcacctgagtttttgctttttaaaagtacaaacagtagcaagattcatttctagcatgatgtagtgaggaggtcaataaatcctttaccccaaaagcagtaaaaatctggataaaactgtttaataccagccgtttgagtgctgcagaaattggcccaaggcttaaaaatccaagaagcatttattcacaaaagctactgaacttcaagtaaaattggcatgagtcatggtgttttcgtctaagcagtttctacccctcctctccctaccccaaccctgtgggcctggcagatggaccagggcatggcaagccaggaagaccaggatctttgctcacagcgccagaggaagttcattcattggtgtgttattaaagttgttcttagtctctttaaaagatagaaggttaatagaaaattaatattattgctgagtacatagcatttacggatgttctttccagaaagctgttcaataagacagcacaaaagaagagaaaggaaaagatgtgtatattaaagtttactgtattgagttagcataattttgaagtagactgtactatgttaagatgcgtattataaaccctagatcaaccactaaaaggtaattcgagaaatatagggaaaaactcaacatagaaataatatactaaaaatattgatgtaacatgaaataagttataaaggagaaacaggaacaaaagacacagacaaatcaaaatggtaattgcaaatccaaccataccaacaattacactaaatgtaaatggaataatgagtaagtgtctgttaaggtgatagtgataggtataattagtggaattagagctgttgaagtaaggaaggagtatacatttactacttttatttggggttgcaccaatattttggttcctaagaccaatggaaaactcttatcctttaaagattgagaaagctgtattaaaaacactccactcaaaatgtagattgtcagactatatataaaaaaatcaagatctagtgtaatgctacctacaataaatggaccttagattcaaagaaacaaataggctaaagtaaataaatggagaaagatataccatgcaaacagtagccataatatagctactgcagatctcttaatatatactttaatgcaaaacaacttttaaaatgaagaataaatttagaggacttacactacacagctttaaaatgtactataaatcttcagtacttaaaacaatgtggtatcacgtaaagatagacatagagatcaaaggaaaaaaatgaaagttcagggatatatccttacatgtatgaccaagtgattctttacaaagatgccaagataacagaaatgaaatggtgctatgacaattggctatccacatatgcaaaagatgaagttagaccttttgcttactgtattagtcagggttttcttagagggacagaactgataggagatatgtgtgtgtgtgtgtgtgtgtgtgtgtatatatatatatatatatacacacagagagagagagaggagtttattaagtactaacttacacgatcacaaggtatcataatgggctgtctgcaagctgcggagcagggaaagccagtccgagtaccaaaactgaagaactgggagtgcaatgttcgagggcagaaagcatccaacatgggagaaagatgtagactgagatgctaagcccacctctccacattttttgcttgctttatatttgctggtggctaattggatggtgcccactggattaagggtgggtctgcctcccccagtccactgactcaaatgttaatctcatttggcaacaccctcacagacacacccaggatcaatattgcgtccttcaatccaaattgacactctgtattgaccattacatttacacatacaaaaaaaaaagcctcaaaatgagttatacatgtagatgtcagtgctcaaactataagacttttaggaaaaaatgtgggagaaaatatttgtgaccttggcctaggcaacaggttcttagagatgatactattagtcatcaaaaaaaaaaaaacaaaaaccagatgattgaactatattaaaattagcaacttctgtgcttcaagagatacctttaagaaaatgaaagatacagctgagaaaagatatttacaaaccctttatgtaatagggaatttgtattcatgaaacataactcttacaatttaataagaaaaatctagtgaacagtatgaacaaaaggtttgagtaaacatttcatcaaaaacatgggagcaggacatggtggtgcagtcctataggcccagctacttgggaggctgaggcaggagaatctcctgagcccagcagtttgaggctgcagtgagctctgattgccccactgcactccagcctcatgacagagtgagaccctgtctctgaaaaacataaaatagaccagcctgtgcaacatggtggtgagaccctatctctaaaaagtaaatagctaaaaatgaaataagaaattatttttaaaaatatgaattactaatgagcacttgaaaacgtgttcagcaccattagttaataagaaacacagtgagataccgctttaaacacactaggatgaccgtcatgaaaagacagttaccaccaaatgttggcaaagggttggaactgaaaggggaaaaattaaggtaatggttaaagaggctggtagagacagaagcaagagtctggcacctggtgtgtagcatgatatttaggaagcttcaaagatggggagaaactgttggaaatgtaaaatggaacaacaacctaggaaaagtttggtgctttcttaaagagttaaataaaactgaccatatgacccagccgctctattaagaatctacccaagaaaaatgaaaattatgtcttcatgcagattgtacactactgctcatagcagcattatctctaagagccaaaaatggaagataacccacatgtttataaattagtagacagacaagacgaaatgtgatatatccatatagcagaagactattcagtaattaaaaggaactgaatactgatcaccagtatactgatgtatactgcaatatgaataaaacccaaaacctttattctaggcacaaaagactctatattgtatgattccattttttaaaaatatccagaaaaataatttatagagacaacaaaaatataggttgcctgggactgggggtgagaacagtttaaaagcaaacatgcttgagggaattttggggggtgatggcaaagttataagcctggattgtggtgagagttgcacaagtctacatatttgctaaaggcattgagctgtaaaattacaaagaatgaattttatggtatgtgaattataccttgatataaaagtaaagtataatgtgaacctggaaaagaacatacatagggaaaaactggctatgaccccttgatgcgttcttccaaggtgagaatgggaaccactgattatttacactgcttggtgtggaaagtttgaagccctcgccttgaactagcatgggaaggtagctctaccttgaagagcctcttgtttttgttcttgaaactgctgggatggtcatggcttatgtcttctgggtgtaaaactactcatcaatgcttgctccttttcagtattttggggtctcttccagggtgtagattttaagctagaacaaaattgggtggaacgtctcctctttagggtttacaatgtgaaactgataatgtgagaagttccactggaggaaattagtacttggtcctaacttgggaccaataacagaatgatgcaaagtagctattcaggtttaagtatgtggaataacaggatatttgtttcagaaagttgaaaaactatagcaactgagaaagatggtggcttacctcttcatattgtcataaatatctaccagaatagaatggaaacaataaaaacaaaaaaggtttaagaataagaaaacaaagctgttactaaaatcaataatataggaagctttatagaattttgcaacagaatattacaaccaatgcatgtgtgaaaagcttcttcttaggccttgtatctcaaagatattaacattgccgttttccttttttatgaacacttacaaacttgccattgaattcattgctgtgaattcaaccataacaatgtcaggtttccaaattctcaagatcatggaaaacaaccaacttggaaataataaagcatacactttagatttactttccaatgtttgacaattaaggattttcttaaaaagatttataacattattccttgatgtttattgggtaactttcatcattttcaaaatttcatgaattctgaaattagccttttaaatatagctattgggtatagatatggaattttcttggagagaaaaaatattttattacttcacttcccttattaaatgctatttttattgggaaaaaatgttttgttggctataaaatatatagtgtcaataattaaatagtatatgcattaaatcaacactagagtaattttccttaggaaatttgttcacaataaactaaacaactataattctattataaatactaatagggattaaaaaagacaaccaagttcttttgtgccagtaagactgagaaagctcttttgtccatgacagagtactgaataaaatttgatttttgacgtctggtttctggaggagagtgaggctatgactggcatgaaaatagttcaggaatattaccatcaagagttggggagaggctgacggcacaaaggtggcatgtgagtttgcaagagagttaaaaggagaaagatggaaggggttggggttgtagatgtgtagatgtgtaggttgtagatttctgagacctctgttcagttccattggtctatatatctgttttggtaccagtaccatgctgttttcgttactataggcttgtagtatagtttgaagtcaggtagcatgataccgccagctttgttctttttcttaggattgtcttggctacacgggaagacctaaaaccataaaaaccctagaagaaaacctaggcaataccattcaggacataggcatgggcaaagacttcatgactaaaacaccaaaagcaatggcaacaaaagctaatattgataaatgagatctaattaaactaaggagcttctgcacagcaaaagaaacttatcagagtgaataggcaaactacagtatgggagaaaatgtttgtaatctatccgtctgacaaagggctgatatccagaatctacaaggaacttaaacaaatttacaagaaaaaaaaaccatcaaaaagtgggtgaaagatatgaatagacacttctcaaaagaagacatttatgcagccaacaaacatgaacaaaagcccatcatcactggtcattagataaatgcaaatcaaaaccacaatgagatgctacctcatgccagttagaatggcgattgttaaaaagtcaggaaacaacagatgctggagagaatgtggagaaataggaatgcttttatactgttggtgggagtgtaaattagttcacccattgtggaagacagtatggcaattcctcaagtatctagaaccagaaataccctttgacccagcaatcccattactgggtatatacccaaaggattataaatcattctataaagacacatgcacacgtatgtttcttgttgcactgttcacaatagcaaagaattggaaccaacctaaatgcccatcaatgatagactggatgaagaaaatgtggcacatatacaccatggaatactatgctgccataaaaaaggatgagttcatgtcctttgcagggacatagatgaagctggaaaccatcattctcagcaaactaacacaggaacagaaaaccaaacaccacatgttctcactcataagtgggaggtgaacaatgagaacacatggacacaaggaggggaacatcacacactggagcctgtgggggttggggggctagaagagggatagcattaggagaaacacctaatatagatgatggattaatgggtgcagcaaaccaccatggcacgtgtatcactatgtaacaaaactgcacgttctgtacatgtatcccagaacttaaattattaaaaaaaatagataatagtagtgaaaaggagggacttggcttgtgtcatcacatttaggaagtttcaatgaatcagggagtgttttccttccacaagactgctctgcactggcaaatatccctgctggctttaaggactgcttgggatacattccaggtcacgattgtttttgtcatctgtcatataaagagctgagggttgtgagacaggggttcacctctgtcacccaggctggagtgcagtggtgtgatctcggctcacttcaacctcctcctcctgggttcaagccattctcctgcatcagcctccagagttgctgggattacatgcacctgccaccacgcccagctaacttttgtatttttagtagagatgggagtttcacctttttggccaggctggtctcgaactcctgacctcaagtgatctgcctgccttggcttcccaaaatgctgggattataggcatgagccactgcacccagcctattttctgttattataaatgcagggtaaaaatcattttttaaagctgcctgatacatctttttattctccattttcttggtatcacaaatgatactgcaatgaacatttttgtgcataattagttttttctacatattgcagaatatttacatagggcagttgcccataaatataattggtgggctaaaattaataaacattaaggtttaaggctcttgatagttatattttatgtttcttccttagcagttgcatgtctatcagcaatgctagtgtcctcttcacccacaatgacgctgtatatcatcattttaagaagttacttgctaattttgtattctctaaactaaagctaactctctaaacaaattcaagataaaacaacaaaaacaaaagtaatatcgtagtagaacctaatctttcttcagtgcgtgctgtggactaaatgctttatgtgaactcactctgtattccactgacctttttcaggtgaatattacattatgtctagtcaaaaaatgagtaaatagagaaacaggttatgcaactatcccaagtttaaattgctggtatgcatacttccaatttattaccaacctaccagtttgtattcatcctatttataaattaggacacttgtattctccccactgactaatgcacattccaatatttttttctttctctgtatatgcccctaccccttttttttctgctgtggtggactcctattccttctttagagatgagtcaccactctgtgaggtcttccttgtagtcatcaccttccttgagtaattctgtcaccttaatggttctgcagcgctgtcatacaggtaaaattacttttgggtatgcctttctttcctgctaaagaactgcctttgccagaacacagaaaatgtgccatgcaatgcaaggcctccttcctacctccattccctgggtggatgggcaccagcacaggaatgtttattgttggatgtggctgggctcaggccacttctctctctcctggacctgtcttacattcatggacaactacaatcaccatttctgttacttaaaatacttgtctccagcattctctccatcaaatcagaaattctagagcagaaattatttttaaaaagttctccaggtggtcttcatgtaacgtgagagagagctactctttgggaatcattgatctggtagcttagtctgaaaaactggtgctttggaatcactggcagccatgccgccatgctttgtagagaaagtgggctcatcagtttcatcaaaggccaatcattctgtctctctgcaagtacatatcagtaaaagggaagagaaaattaacaaaataataaaatgttagaaatgaatggagcatgatgatcataccaccaataatactaaaactaatgtttattgaccatattatgtaccagatgctgggccaattgctgtatgtgcattatctcttaatctaaagctgtgcttatgaagtaggggattattatcttcatttttcaaatggagattctaatatttagacattaactaatttcatcaaagcgacacagctagtaagtacgaaaccaggatttaaaataggcagcctgactggaatctgcatgattaaccctgatgtaaggggcatgggggagtttaggggaggaacttagtctaaccctacatctttcatgtttaaatagcaaaaagaagaaggcagaggactggtgtgatttaattaataaagtttatatatccatatacaagtaaaaaaatcatcttttcaagtttccatgaaacaaatgttcatgtaaatacagaatgggttcaatactgggccaaatataaaatactaaaaaaacagaaatcatgcaagccacatttactaataatagaataaaaattaactatttttaataatacaagtcagcaattttcccaaacccaagtaaatattaaataaaaggagaaatcataagtggaattatagatgatatgtaataccatgaccatggaagctatacattaaacactttgacatgcagccagatgaatacttcctacagcaaaatagggcaaaaactatcttaagagttttcttttttaacaagagggaattaaaatcaataatcataacactgaactatttcttctaagaagataaaaataaaaacaaagttaccttttggatgcattaggctgatgagcatgtgacccagccacatcctctgaatggaatggaatggaaatatgtgtggggcaatagctaaggcctaattatgacactgcagatttagattttttgtttctcttctatgtgtttaagtcatttccttatggaagtcacttaaatggatctgacacttacaaagccattattatctgctgtgttgtattctgtgttctttgaagtgattgcaaattggtagataaatcatgctggtagattccaggtttcaaatgtaggacaactcatctataattattaaaatctcctagcaatttcatctctaaaactgccataaatggtatatatatatatatatatatatatgttaatctatgtatatttatttgagagtgtgtatatacacacacacacacacacacacacacacacacactgccttcataccatagacacaggatgctctataatgcatattttgtttattcttagattaattaattttcttctctcttccatgaaatgctattatggcatttttaatcacaactgcaattatcttaagaaccgtaccaaaggagtgtcaggcattagtaatttcattaattttagtcattatgccaaaatacattaatttaaaactcatatactcaaataatcaaaataatgcctttttcactacttttcaatgtttttctccagctctagttttttctatttttatcattgctagtaatacccttttcctttgcacatctgtgatgagcttttatgataatagaagttaatttttttctgcctttttagagtattgcattagcagtactcttctttcagggaaacaaaattctcatggtcgtttacttgtgctttaaaatgatttaatgatatttaaatgaatgtttatattttctaccttgcattagagttatatgtgtatgttaactgttttatcttcactcaaagtgtgagcacctgagagaagttttatactttggtattctccctggcatatattacatctatgtccacatacatatattccagtactttgcacatgttagctgctcaatttgcatacattaaatgaagaaaaaaatggtgacttttgtcttttgcaggcaactttcccattctcatttttgctttctttgagctgttttcctgtaacacacctaattcagccaccactgtggaaagtgttctttatctgatctgattgctcaatatcagaagggttacaaagattattccacaatgaaacctaagttgttgtttatgtatttaaattaaatttggatcccactactaggaatctactcaaaggaaaagaaatgaatttctctaagggctacctgcatttgcaggtttattgcagcactattcacaataacaaagatagcaaatcaacctaaatgcccatcaatggattaatggttaaagtgtggtacatatacaatatggaatactatttggctagtatagtatgaaattctatcatctgcagcaacatgggtggaactggtggtcattgtgttaagtaaaacaacccaggcagagaaagacaaatttcacaggttctcactcatgtgggagataagaaatttgatcacaaggaagtagagagtggaaagagagagaacagagactgggaagggtgagtgggatggctaaagagatgtgacgagtacaaacatagttattcggttggagaaaagtaatggcaaaaaccgcaattacttttgcatcaacctaatagaaggaatgaattttatgtttcatagcagattagggtgcctgtagttagacaaaagcatattttactcaggtgatgaacaccctaagtacccttaatcactatgcattatatacatctaacaaaatttcacaagtactgcatacatttgtaaagataaaaaatattttaaatgaaactttgaactttgcaaaaaaagaaaagggttgcacaaataatcatatagtttcctcaacaattaggttaaacttctctcttgtcttttctcttcacccccaacccatacttgagagattttataaatgattcatatagtttaatatttatctgtgatcttctggaaaggctaagctgtggattatgactactttagccttaggagctctcctttgattttaaagtatcttcttacccatcaaagtggccacaagctagttacagttgcagtaagcaaaattgccctaaaaaaagaaagaatggactttcttagtccatttgtgttgctataaaggaatacctgagtttgggaagtttttaaagaaaagaggttttttgtttttgtttttttttttttttttttttcccccccaaacttttaatttaaaaaaattttttttttttttaaaggttttttttttaaaaaaacccaaattttaagggtacatttccacattgtccaggttattaacatatttaaacatttcccagccgggggtgccccccccacaaacttttaattaaccataaggtatatcccccaatgctatcccccccccctccccaaaccccacaaaattcccaaaattttaatatccccctcccaatttccatttaatcccatggttcaatcccccccaaaaattaaaaatacccggtgttgggtttccggttctcgcaaaattttacggaaaataagggtttccaatttcacccatttcccaaaaaaggaacaaaaactcatccttttttagggcgccatattatcccagggtgtnnnnnnnnnnnnnnnnnnnnnnnnnnnnnnnnnnnnnnnnnnnnnnnnnnnnnnnnnnnnnnnnnnnnnnnnnnnnnnnnnnnnnnnnnnnnnnnnnnnnttaaaaatattttgggattatttggaaagggtaaggggtggataaagaataaattagcactaggagggttcccttggattttaaggatttttttaacccttcaaaggggcaaaagggtggtaaaggtggcgttaggaaaaatggcccaaaaaaagaaaagaaagaaatttttttgttccattggggtgggataaaaggaaaaccggggttggggaggtttttaaagaaaaaggggttttgggtttgggtttttttttttttttttttcctctctaaatttttattttaaaataggtttttttttttttaatgtttttttttttattatactctaagttttagggtacatgtgcacattgtgcaggttagttacatatgtatacatgtgccatgctggggtgctgcacccactaacgtgtcatctagcattaggtatatctcccaatgctatccctcccccctcccccgaccccaccacagtccccagagtgtgatattccccttcctatgtccatgtgatctcattgttcaattcccacctatgagtgaaaatatgcggtgtttggttttctgttcttgcgatagtttactgagaatgatggtttccaatttcatccatgtccctacaaaggacatgaactcatccttttttatggctgcatagtattccatggtgtatatgtgccacattttcttaatccagtctatcattgttggacatttgggttggttccaagtctttgctattgtgaatagtgccgcaataaacatacgtgtgcatgtgtctttatagcagcatgatttatagtcctttgggtatatacccagtaatgggatggctgggtcaaatggtatttctagttctagatccctgaggaatcgccacactgacttccacaatggttgaactagtttacagtcccaccaacagtgtaaaagtgttcctatttctccacatcctctccagcacctgttgtttcctgactttttaatgattgccattctaactggtgtgagatgatatctcatagtggttttgatttgcatttctctgatggccagtgatgatgagcatttcttcatgtgttttttggctgcataaatgtcttcttttgagaagtgtctgttcatgtccttcgcccactttttgatggggttgtttgtttttttcttgtaaatttgtttgagttcattgtagattctggatattagccctttgtcagatgagtaggttgcgaaaattttctcccatgttgtaggttgcctgttcactctgatggtagtttcttttgctgtgcagaagctctttagtttaattagatcccatttgtcaattttggcttttgttgccattgcttttggtgttttggacatgaagtccttgcccacgcctatgtcctgaatggtaatgcctaggttttcttctagggtttttatggttttaggtctaacgtttaaatctttaatccatcttgaattgatttttgtataaggtgtaaggaagggatccagtttcagctttctacatatggctagccagttttcccagcaccatttgttaaatagggaatcctttccccatttcttgtttttctcaggtttgtcaaagatcagatagttgtagatatgcggcattatttctgagggctctgttctgttccattgatctatatctctgttttggtaccagtaccatgctgttttggttactgtagccttgtagtatagtttgaagtcaggtagtgtgatgcctccagctttgttcttttggcttaggattgacttggcgatgcgggctcttttttggttccatatgaactttaaagtagttttttccaattctgtgaagaaagtcattggtagcttgatggggatggcattgaatctgtaaattaccttgggcagtatggccattttcacgatattgattcttcctacccatgagcatggaatgttcttccatttgtttgtgtcctcttttatttccttgagcagtggtttgtagttctccttgaagaggtccttcacatcccttgtaagttggattcctaggtattttattctctttgaagcaattgtgaatgggagttcactcatgatttggctctctgtttgtctgttgttggtgcacatagttggaagtaaagctctcctcagcaaatgtaaaagaacagaaattataacaaactatctctcagaccacagtgcaatcaaactagaactcaggattaagaatctcactcaaagccgctcaactacatggaaactgaacaacctgctcctgaatgactactgggtacataacgaaatgaaggcagaaataaagatgttctttgaaaccaacgagaacaaagacaccacataccagaatctctgggacgcattcaaagcagtgtgtagagggaaatttatagcactaaatgcctacaagagaaagcaggaaagatccaaaattgacaccctaacatcacaattaaaagaactagaaaagcaagaacaaacacattcaaaagctagcagaaggcaagaaataactaaaatcagagcagaactgaaggaaatagagacacaagaaacccttcaaaaaatcaatgaatccaggagctggttttttgaaaggatcaacaaaattgatagaccgctagcaagactaataaagaaaaaaagagagaagaatcaaatagacacaataaaaaatgataaaggggatatcaccaccgatcccacagaaatacaaactaccatcagagaatactacaaacacctctacgcaaataaactagaaaatctagaagaaatggatacattcctcgacacatacactctcccaagactaaaccaggaagaagttgaatctctgaatagaccaataacaggctctgaaattgtggcaataatcaatagtttaccaaccaaaaagagtccaggaccagatggattcacagctgaattctaccagaggtacaaggaggaactggtaccattccttctgaaactattccaatcaatagaaaaagagggaatcctccctaactcattttatgaggccagcatcattctgataccaaagccgggcagagacacaaccaaaaaagagaattttagaccaatatccttgatgaacattgatgcaaaaatcctcaataaaatactggcaaaccgaatccagcagcacatcaaaaagcttatccaccatgatcaagtgggcttcatccctgggatgcaaggctggttcaatatacgcaaatcaataaatgtaatccagcatataaacagagccaaagacaaaaaccacatgattatctcaatagatgcagcaaaagcctttgacaaaattcaacaacccttcatgctaaaaactctcaataaattaggtattgatgggacgtatttcaaaataataagagctatctatgacaaacccacagccaatatcatactgaatgggcaaaaactagaagcattccctttgaaaactggcacaagacagggatgccctctctcaccgctcctattcaacatagtgttggaagttctggccagggcaatcaggcaggagaaggaaataaagggtattcaattaggaaaagaggaagtcaaattgtccttgtttgcagacgacatgattgtttatctagaaaaccccatcgtctcagcccaaaatctccttaagctgataagcaacttcagcaaagtctcaggatacaaaatcaatgtacaaaaatcacaagaaaagaggtttattgggctcatggttctgcatgctgtataagaagcatggtgccagcatctgcttcttgtgagggcctcaggctgatttcccttgtggtgaaaggtgaggggacctggcatatgcagagatcacatgacgagagggaaggcaagagagagtggagattctaggttccttctttttttttttttttctttttgagacggagtctcgctctgtcgcccaggctggagtgcagtggcccgatctcggctcactgcaagctccgtctcccgagttcacaccattctcctgcctcagcctccccagcagctgggactacaggggcccgccaccatgcccggctaattcttttgttcttttagtagagacggggtttcaccgtgttagccagaatggtctcgatttcctgaccccgtgatccgcccgcctcgacctcccaaagtgctgggattacaggcttgagccactgcacccggcctccaggttccttttaacaactagctttccaggggattcttgtgggaactgatagagcaagaactcacacattccctgccccagggagggcattaatctattcatgagagatctgttcctatgatccaaacacctcccattagtcaccacctccatcactggggatcaaagttcaacatgagatttggaggggataaatcaaactacagcatagatcaatccagaaagtatataaaatctggctttgtaacattaaactggcatccatgtattcacaggggctgagcccttttgttttgtggatgtactcttgtgatgctgtaatttgtaatgttaaagaatatgactctcacaagcacatagtcattttacgtaagtcctctccaagtttgcttcctctgaaaagatggcaaacgaacttttcttgctctccacactctgctgtgttctaagcttcttggagatttttgtgtaagcctcaattaatgaatgggttctcctcaacttatgatgggtttatgtcctgataaacccaccgttagttgaaaatgttgattccacgtcaaaaatgcatttaatacacttaatttactgaacattattgtttgcctagcctatcttaaacttggtcagagcacttacaccagcctacagttgggcaaaatatctaccacaaggcttattttgtaatacagtgttgaatatctcatgaagtttattgaatgctgccctgaaagtgaaaaacaatggtttgacaccattgcaaggacaaaaatcattaaattgaacccatcattagttggggatcatctgcatgttttaatcaggctgagatttggatgttaaccccaatacctggttgcttggaaatgtggcaacttcacccagaaaaacagacacgagacttttctaaccactatgatcagtgtttttgtaacttcattaattcatcctgcagattcttttctgttcaaattcttctgtgtgtatccaaaattggcataaacctagtccagttccctgggaattatcttattttttcgttaaggcagcacaagtacagaaagaattatggattaccttattggatttctccacatttatgtgaaattcatctgcatcagtctgtttttttgccttttttaattggtaattcaaactgatttccaattctccgttgaactatgttatcccgttctctgaacagagtggaatttatgtacttctgtgtactcccccttcatgtttatccaatggataagtgtaacttatccttttgactgcagcataatttacatgaagaacatttaactacccattgggctctttcaatattaggaaagattatttcactggatttctttggaagagaaaaatcctctaaaatacatgtcatcctttttgttgtctagcaaatattctctctcttccttctccttctatggtaggagtgtaatattaaagttgggcttggacacatgactttgtcaatgaaacatggcagatgtgacagggcacatgtttctatcaatcctcatgtactcctgcctgcattatgaaatagtatgtcttagttggtagctgctctttcatcctgggactttaaataagaaaacacatggaggctgttctgaaactgacttattacctggagagggtccacatagctgacctgcagaccagcctgtgcaaaacgaatacttgtggctgtaagcctctgagatttggggttgtttcttatgaagcatttttacaaggaacatttgtccagtgggaattcagaattgttctggatcagtgactactatgtgcctctcatttttcacctgtccaaatggggttgtttattgctgtcatccttgtgttgtttcacttttgtatgatgtatgtatgtgtgtgtgtgtggtcataaggggatgtaaatagcttttctttttacctcatcggtgtctgaaacagtacaaaccatatctggacctgctacagaagttagtacaagatcctggacttcaaatctaatgtcttttggagaattccctgagagagggtatgagtacattttggacacagagggaaggagcactaatatttgagatcaagagcgaggactatgaaagattttattattcagcaaataatcactttctcttcatcccctattggaagcaaacactattgaggcccatctctgttgttttggccatatgacttactccgaacagtggaatgctggaagaagtgggtgtgctcactctaaaggaaggttttaagaggcattgaaagtttctgccacccttcttgcactccagcccttctcataatagtagcacaccctggacaggctggagtgcagtggcatgatcatagctcactgcagcctcaaacttctgagttcaagtgatcttccttcctcagcctcccaagtagatgggactacagtgcacaccaccccacctggctttttattttttgtagaaacagagtctagctatgttgcccaggctgatttcaaactcctggcctcaagcagtcctccctcctcagccttccaaagtgctgggattacaggtgtgagccgctaaactcggctatttttatgaaattttaaaacataagtgtattatttgactccttgagaaggacaagtaagaaacagaattgtggacctgtttagatgctaggaggcaatatggtgtggtgaaataaatatcagttttggattaaatatttctaattctgatccgaacagcgatgatttctctgtgatatttgagaagtcacaatgtcttagaacacaatttgtctagacaatggagagtccaaagtgggcagggggacacaggtcaaaaaaatgacctatctggtactatgtttgctacttggacaacaggatcattagaagcccaaacctcggcatcatgcaatatgtccatgtaaaaaacctgcacatatatcctctgaatctaaaattttaaaaaagaaaaacatgatgtgtttcatttataaagtgaccctttaacatactgtgaaggattgctgggaaaacttgaaataatatatgtaaattgtgtagctcagtgcctggcatgtattatgtggtcaataaaagtgggagcatttgttggtagtgctggttcttgttgaggttttggtgattctcctcttttaaactctactcaggctaaggctcatgtcttcaatacactttggaaggaatctcaacacttgctcaagtgctgggtattcagtagatgtgacgggctaggatacagactgtgatattgactttctttttagaactgtgaattgtccattatgcctatggttatggaaaaataatatgcacaagtttttcaaaagaaagaggagtgtagtcaaaggttattattagcagttcaacactgcgataggtgttgtccaatccgctgtacacaggtctcctttagagccaatgtcttgtttaaaaaataaagcaagctaagcatgtaatagtggcacatcgagaaatgctttatgtgatacagagtgtacccgagtgctgactgaagtagttatgaagctcctgggcaggccaaatggcataatagcagcaaacccatagatctaggcttcttacatggtaaataacaaggtaggtcaggtgtaccctggggaggaggttttggggatctgagttcctgcatctgagtcttttccattgtatatatcctttccctccttgttggttggttttagtattaaaacaaagactatcccaggttctctgcaccctaaaatctggaccagcccataggatctggtccaaccacatacttacctattaagaataaaacaattgtaaaagtgtaatatttctattccccccaaaaaatcagaaagtaaaaagcaagttaatctcattagctttcaggataataaattattttactaattcactctctctctaatctcatgatatttctaaaatattttaactgttatgtgatatcttcaaaaacatataaggaactctgaaaaagaaggagggcatttttccaaatttcttacttctcagaatatataaaaatattcaaaagtaaaaagaatgattcttgaaatctgaacttgaggctttgttttattatataatgcaggagagtgatgccgctggctgagtctgggaaagtttacagaattctggtctgaggatcatcccacaaccccctcccctaccaagacctagagtctgggtgttcagattgggcacttggcagcagacgatgatctagaaggcaatcaaggaaagtggctattaaaagatcacaggcttactgaagggagaaaaatgacttttgctaaaagctaaatctctgaatatccccgaagctattttttctcttgacctatatgtgtggccctgtgtatgcatagtcacaattttcacctgatttttttttgggtgtggggggtaatgatctttacacacatttaaatttaacacttgctaagccacttaaaggactgagttaaataagaaatcacttaagcaatcttggattcttgccattccttgtgatttcatggggaggggggtaccactcgtaggacagaagccaatctctaattgttttatttaattagatcatttcaatagctaagctagcctgaagaccttgtttctctgtgtcctctcaccttgattgggttgctttgttcaagcctatttctctagaacctttgtactttttgaccatggaattgatggggtattagctggggtcttcacatattttagcagaggcatttctcaggttgcttctcattttcccttctcctctgctccatgatatatgaaaattgattatttttgccttcctgcagccaagtagaaggttgtaagtcactatgaatctataaaagctgtcacctttcagtggtggtgcatttgtgatattttctgagggctaagagaatgggtgttcttgataaatacttctccctgtcacctaaaagacaaaaaaagaaagtattccactgtcaatttatcataaacttgaaatgtcaatggaaaacagcattttttggttgcacatgaaaattacacatggcattactttgaaagattgaatcttctgaaactcatcaagcaataactgctccacacattcagggatggcagtgtttttcttcctcttctgtcagggaatgcattacagaggtgatgtgagtctatggcttctctgagcaccaataagaggtccaaatgaatgattggaatgcttgcaacttggctgaaccaaatgtgatgagttcttgttctcacctatttttaaataactcctaaatattcaaccaaatgtaatttaattgcatttacatattggaagctaagcaatgggtgaataaggccaaatccttagcaggatgctaatgggatttggaagttcaagatccctgatcaactctactagcttatttatgatggaatcacagatgtggatcacaggtcaagaaaggttggtcagttgtctgagggagcatttctccacaattctgccccatcatttccatacaaactaaggttacaccctataatttgagtgtggtctgagtctactaggaagggggccctggaccctaaatcttatcttcattagatgtcagagttagatggtaccttactcaaaaacgggcccaactcctacatcttaagctgtaagatttacccaaagacatacaacaaagcaaagtggttgcagattctggtgcacagcttttacccacaagtccattgtcacgttggttttgttttgttgtttgctttccctatctccactctgatcctaattctgaccataagtttcatctgcgattttgcacaagtcaggagtgacttgtgggtgaaggcctgtgtatgagtgggatccgcactcatgcatttacttgcataggtcctgcaaggaaggacctcagcctcaacagcatccttcagagcagccaactgcagtgatccttttcttatccgtccttattacttatttacataaagagctgccatcccttaactaataaattttgagcctttcttgtaaatctggatggcttgccagtgtgatggcagtgcaaaagtgatttccccagagggcaggcagtagacagaaagtaactccgcctttgttagggaagatatatgaggcttttagctatctgcaaatatggtgaaattggacgatggtagcagcatccaatcaccattccagttcctctctgccagaaggacataatgcaggagtcagtatatggttccatgcccaaagatgcaaaacagaaagataatagcatatgtttgctgagacttgaagccaggtattgcattaagcattttaaataccttattccattttaaaatccttactatagcctgagagggtgagtattattaaaatgaccattttgcaattgagaaaaatgaggccccaaaaaagctgatcctcttgtttaaggtcttaaaattagaaacagaaaagctggcattgaacatgggctatttgaccccgaaacctacggttgtagccatcacactctgacatgagaaactgctaacttagggctctaatttcatgcaagcccagaaaaacagtgtattgaaagaaaactggtaccaacctgtgggtacggtgatgtgtcttctagtcccaggtcaccacgcactgaccatcaatcttagggaagtcatctgttctctgcagcccaacctttgcattctcatctgttaaatgagtttgggacagtttggtttctaagatctcttctagttctaactatctggagctaggttgtaaccaagccaagggcaggagacacatcacctgattctgagttaaacccccacaggacatttatatgaggtcagtgttgatacctccacatgactctttatacagaacagttcacaaaacatgacttatagactgtaccataaaagggcttttaggaagcatttaattaaagccccaattcttttcttaatatatgatgcttactgaaaaatattagatgtaaaattaaaaaaaaaaccatgaatctcattggtaattctaccacatttcaaatatatcacacttaatagtttggtaaatatatttccatgccaccccctgttttggtactaacatatgcaagtatttttctaaacaaaaataaagtgataatatttaacctgcttttgactcccaataaacagtgcagtttttttctgttaatattctaaaatataaaatatagtcatacagggaggggaacaacacacactgggacctcttgagggttggggttgggggagggagagcagcagtaaaaatagctaatgcatgctgggcttaatacctagattatgggttgataggtgcagcaaaccaccttggcaaatgcttacctatgtaacaaacctgcacaacctgcacatgtacctaagaactaaaaattaaaattaaaatatcaccataatggctgcatagtattccactgaatgaaagcaaaataattggcgttatctttgctcaatagagcaaaacgagttcatttttaaaaattgttttcattttttattatgaataacttgacagatattcctagagttaaatacatactaacttcaatgggataaaagaaaatgaaagaaatgctacattaaagacaatgcacttttaaaaagattttaggtacatactattaaaatctctacagaaaggtttattagttgtcattttacccgttagtataggagagtgtctatttccctaaacattcatcaatattacgtactatttttaacaagtattgccaaaccattgctgagttctcagggtgtcttcaaggcaatttaacatgatggataaaacacagcccctagaggcaggctggaactggggctctgctgtttgctatgttgtgacctttggcaagtaacttaacatctctgtgtctataaaatggagactttagtaacatgaagggttgcatgttatatatgataacatatagagaggaagtagaatgtaggtaagagatattttaattgtgaattactattctttaattacaaatgaatttgagcacttgaataagtttgctaaccatttgtttctctttttctcaactgtagcttgctgtgtttagcccacttttatattcaaagattctttttcttttcttaactttataagaaggttttatatgttaggaatattactttttgcctttcacatgttgcaaataagccccatattttcaaacaagcaccctgagacccagagagattaagctctgtgtcttctaatgttccatccaggtctcttaatttgcttcatttttcattcatttgttgtcacaaagcttttcctttttgttttttacttttggtgagttgtcgattttattcctctttttttcttcatgttcaatccaaatttgaacttaaataaatacaattacaccttgttaacaaaggcctctggaagaaaagtaatttcaagaaaattgtaaaattgacttattacttcagatgttgagctctatgtgtcttttgtgattctgttcacatcctctgaagtctgttctaaccatacctgtctgttttccggttatgccaggcaaaattttaagttgaatcctgtgatggttagtattgattgtcaacttgattggattgaaggatgcaaagtattgggcacttatttctttcctgtgttcttatacactttgtcatatttagataatgcacttcccttgcattattgaaattgtctttatgtatgttggtctctcagcaaactgtgagttccatgagggtagggacaatgtttcttttgcttttctgtcctcagagcctaataggcatttggagaatggcaaatcagatcccttatatcaggatgagaattagcagaactatatgtccagaagctacctgaggccttctgccagctacatctgccataggaagttataaaagcaattaagtgttcatacaactctaaacttaaccatgctacagtagaggtgattaaaaacaacaacaacaaaaaaaaacttaagcactgttgatgaaaagagttgaactctgtaaattatttgaagagatttattttgaaccaaatatgtgtgaccatgacctgtgacacagccatcgggaggtcctgagaacatgtgcccaaggtggttggggctcagcttggttttatacattttagagaggcatgagacatcaatcagatacatttaagaaatacattggtttggtccagaaaggcgggataactcaaagcaggtgagggagcagtggggagcttccaggacataggtgaatttaaacattttctggttgacagttggttgagtttgtctaaagacctggaattcacagaaagggaatgttcaggttaagataaagattgtggagaccaaaattcttttgaagtcttatggtggctgcccttagagacaatagatgacaaatatttccattcagatcttagtcagtctctttaggattgggagggtctggaagaaaaagatctagctatgtttatagagattctttacagatgcaaattttccgccacaaagaaccactttacagggccatttcaaaatatggcaaagaaatatgtttgggggtaaaatatttttattttcttccttgtctcataatgttatgccagagtcagtttggaaagtaagtcacagtatatagggttaaataaaacccgtctaaggagaatttacgatttgtagggcatgactccccacatcccttaggaatttgggcaagaaaaaaaaatcagagtttagtcctcagcacatagaaaaatcatctgacttctattatcttccactaaatcactaaatcttgggcatgccatttgatctctctgcatcacactctctttatctgtaaatgaaatattggaactaattgaaatgcctctaaggccagtgttttaagttccagtgttttatagttctataaggcttcaaactagaaaccacatatatttgtgtttttatttttttttaacttttaggttccagggtacatgtgcagtttcattatataggtaaattgtgagtcacgggggtttggggtgcaaattttctcatcacctaggtaataagcacagtacctggtaggtagtttttcaatcctctccctcctcccaccctcaagtaggccttggtatctgtccccttctttgtgtccatgggtactcaatgtttagctcccacttttaagtgagagcatgcggtatttggttttctgttcctgcattagttcactgaggataatggcctatagctccaaccatgttgctgcaaaagacatgatctcacccactcttttttatggctgcatagtattccatggtgtgtatgtaccacagtgttttgtttgtttgtttgtttgtttctaatctaatctaccactgatgggcatttagattgattccatgactttgctattggagatcacatatttgaaagagaaaagcaagaaataaacaagaataggagtgaacccatgttcactagatctaatgatctgtctcatatacttgagggagttccttattcaatggagacaaacaaaagaacaacaaaacacaaaaataattataaaaacatcaagatagccttcaccccataggattgtatttatgataacaattcttaatcttctattaacggggttaaaacattctttactctgcacagctgttctgtagcttttaagatatggcaaaaattgcaaaagaatcctgaattttaaaggaagggataccaaaatagtgtgcatattatggctacagaagcagtggctttggtgcttttatttggagctaccatcatttccacttagctcatttctgtatgaaaatgaaactaatcagcttcagtgcatgaaaccattagctactacttcaaagtgctgcttttcacaaaggtcaaagagggcccacccagcagcaacaggaattttgcaagtgatgtgtgtcacatttgcatatgataattagtttctctataaatacaatttgttctgcagattaacattttgtgtcctcattagatagcaaacatttccatattaaacccacaaagctgccagcgttggctctgcttgcattgcatgatagcattaatacctttgtttatactgatgccaattagtagtgctaagtcttggaagaataaaagagatcactaatgctattaatataagtagtaataataatgttgagaagctttcacaaaccttgttaacttcaaagatcattagcagtaaagtaccactgggttgtaaatggctgcgttcttggacacataaagtataagcatatctagaatgctctggtctgccttctcctggcttacaacaatgccagtcttaaatgatttgcatgctgtaaacaggagcaagcaattaaaacgttgttttcttttgctaaatgcatttagttcaataaggaaaaaggatgtgctctagccagaagaaacagcagtttgctcaacttgtgtagctcattgcaacacagtttgctgtcatttaccaggccaacttctctaaggcggcgaggcattttatggttccataaaaggtttttataaaacaagatgacctggaatttctcaggggaggatttagttttcactggaccagagtggcaagttctctgaggaggttgttgagggatatagaagacggtgatagatacatgagagatggggtggtggttgtcacctgttgcattaatcttttaatactgagtagaggaggctgtgtcagacagatgctcccttgtgaagtgttagttctgcacctgaaagggctgcacttacatgaagactagtagtcattcacccacagttcagtgacaaggtatggatgatcatatagtcactgttggtaagcacatttcttacagtaattaactaacttcatttctcggcctgtttttgttttgttttgtttttgagatggagtctcactttgtcgcccaggctgatgttcagtggtgcgatcttggctcactgcaacctccacttcccaggttcaagcgattctcctgcctcagcctcccaagtagctgggattacaggtacatgccatcatgcctgactaatttttgtatttttagtagagacggggcttcaccatgttggccaggctggtcttgaactcttgacctcaggtgatccactctcctcggctccccaatgtgatggtattacagatgtgagccaccgcacccagccttcctgcctgttttttgtttgatgtggtgtatatacttagattcagcaattttaaaaaacattgattaaagcaccagttaatcaactgcgatattcaaccaaaatttaaatgctttaccattggagtttgggctgggacacagagcccaaactaaattttactaaaatgcagaattttatatcatttcagaagtcaggctcacagctctgctattactagctgggcaattttggatgagacagtttctctgtcttaatttcctcatctgtgaaatggagacgagaattgtacatacctcacaaaattatcatgaggattaaatgagctactccagtggtaacacaatgcctggcccaaaaaacagactccagtggatacaagctattgttctcagttttgcatacttaatatttcctgatgctgggggaacaacagttacaaaataacatctctcttggcagattgataagaactccagtcttcctcaaatcttacccaggaggcgtcacatgtgccagacacagaaccctctcctctcagctgtgacctgagttctctattctcctgcctctagttgtttcttaaatatcacctgtcactcagatggtgtttccttcaccacttccccatccttgcacctgccttgctgtggagctaattttgtcttatccaatatgacatgatattctgccattgtctcatcttatgtggtatacagcatcactcaagtttcagaagagtgtagtcttatattttcactgttgaccaaagatttctgtaaccttggtcttttgttctcactattctatcactccaagctttggcacaagttccttgtgggaagaaaactggatccacataagtagttgagtccatacctccaatcattcttcccttcttatgcggacctatggccctgaagaatgacttgtggttggtgatatggtttggatcccatgttcagttgtaatccccaatgttgggagtggggcctggtgtgaggtgactggatcatgggggtggatccctcatgtttggtttagcaccatccctttggtgctattctcatgatagagttcttatgagatctggttgtttaaaagtgtgtagcacctccccctactctctctccctcctgccctgaccatgtaagacatgcctgcttcccctttgccttccaccaatgattttaagtttcctgaggcctccccagaagccaagaagatgctgccatgcttcctatacagcctatggaaacatgagccaatgaaacctcttttttctataaattaccttaggtatttcagagcaagaatggactaatgcggttggttagctagttaatcattggcttcgccctttagcccttcatacaggaaatacacaatggtatacaatgaatacccttcaggtccattcctgctgttcatgtttcaatcctcaatgtgaatatctggaagactcccttgctgagatttctgctgtatgtttctgggtgtgaaaaggaaccagggacatttaatatacaaaagaggaagtttagggaggccatgttaatttctctaaatacctgaaggactgcccagtggaaagaaagattaatctgcttccgacaaccaagccaatagatggaggttataggaaaaaaagagatgttagctaacaagaaagaacattctaatgatcatagctgcacaaggaggcctgctctgggagaaaatgagctctttgttttagagatattcaagcaaaggctaaatgataactggcaagatggccaacagaggggattcatgcttcagataagagttggccttgagcagtgatggctgtaaatttctctgtgggagcatctttgggcaccaactagtatgaaaggactactggcatttaagggagactttaataattgccttataattatatgttacacaatgcttcatataaaatgaagaagtaacagttatccttatcaaagcacaaagtgataggccgaaggtcattgctcattcattctacaaatgttcattgaacctttattatgcctagaaaagcagacacgtttctaggttttggggcaggatattgagcaagacaatgtttactctcttgagcaggcattctagtaggagacagggataggcctgtagacaaaagaaaaagtagatacaagtcaaggtagatatcttttaagacactccatcaacttatctttttaccacttcatctagggttcttttttccatgagtctctgctacaccatcctccaacactagtacagtcagattaaagggaaaacagctgatagacaataaattaagtctctggtcctgaaaaatgtgatgagtggatttctcctactagctgtttctctccttctctagattcaacatggaagagtaagaaccctctcattcacatgataaatactaaataaatacacaatgaaaaaaatagactgtattaccaatggccataataatacaaatatttctctgtattactcaggagaaaaagaatgtaaaattatctttttagatcaggtgtccatcgagtccctatgaaatgtctgtaaacgttcaaggtctaagtcgtacatttcctttggagtctctcatgaaactgaatcttctaaaccccccactgcttcgatcacaaaatagattcttggaagtgaaacaggcctgctaaaaactctcctttaagcaatgaaggatgtaaggaaactggaggagtttcaaagaataataacaagaatgattaaggggctgagagcatgatttatattgaatgattaaaaggattaaacatgcagaacttggccagtgctacacacttagttataaaaaacatcagaatcaagtgccaaagctctcagctcccatgaaaaatacaaatttgcatatgatttggcacatatttctaagtgaagttcagcagatctttaccgaggcagcattcatacaatgccaaaaccacttgtctggtcattttaaagtacagcctggtgatgtcagtaaaaacttgctatttgacttcattgaatagacaattaaaacaaaatgtgcccacccagggctgccatccacatgtgatgcatccataaagtatataaaataatgtaacacataatcatttactgtattagtctgttctcatgctgctataaagaactgcctgagactgggtaaatgataatggaaagaggtttaattgactcacagttccacagggctggggaggcctcaggaaacttaccatcatggcagaagaggatgcaaacatgtcctttacatggcggcaggaaggagaagaaggagaactgaggaaagggggaagcccctataaaaccaccagatcttgtgagaacttactcaccatcatgagaatagcatggaagaaatgcccccatgattcatttacctgccaccaggtccttcctatgccacgtggggattatgggaactacaattcaagatgagatttgggtgggaacacagccaaaccatatcatttaccctagagtcacaaaccaaaattcctacagatagcagacaggcaatcacatgagtgaagtgggctaagcataaagggtgcagggcctatgggttccagccaatgtttccatgtgggtattttggccaagagctgacagatcttcttgtctatcagatgacgccagtgattaagggtgctttcagcagcaagtaatgaaagagcaacacaaaaagggggagctggtggagccagttaccctagagctgcatatctccagagtaggaagaggaactactgggttaggaggagggaatagaaatcgatgtgaaaaggaaatcaagtggtagtcattagaatttaaaaatccatgttgttaatatttttaaaaatccactgacttaaaacacatggacagaaataccattctttggatattagcttgttgccacttatctggctaacttctttgttttagagctagaaaatagatccagggaaagggaaaaaacattctcaaatgcatagtaaatgtagatccagggaaagggaaaaaacattctcaaatgcatagtaaatggatcatcagaagaactgattagaagcagtggcctaggaaagaatatctgggttcttttctgattttgttgtcggagtgatttacttctaggttcataactttgaactttcttttcaattactttttattgtatagacaacataaaattttccatcttaactgttcttaagtttataacccagtgatgtcgagaaatacattgtgcaaacatcaccaccctccatctccagaaccttttttatcttgcaaaaatgaaactctgtatgtataaaacagtaagtctttattccctctccctgcaaccccagacaaccaccactctactatctgtctctttgaatttgagtactcttatgtaccccaaataaatggaatcatattttttttgtgattggcttatttcacttaccatgaagtcctcaagatttatctgtattgtagcatatgtcagaatttccttcctttttaagactgataatattccattgtatgtatataccacatttgctttatccattcatccatcagtgggtattaggttgcttctacctcttgtgaataatgttgcaatgaacagggtgtgcaaatatatttttgagatgctgttttcaattattttggatatgtacccagaagtgggattgttggatcatgtagtaattttacttttaatttttaaataaacctccatattgttttccatagaagctgcaccattttacattaacatgaagagtgcacaaggattccagtttctccatatccttgctaatgcttgcagttttttgatagtggccattctaatgggtgtgagatgatatctcactgtagttttaatttgattttcctgatgattagcaatgttgggcatcttttcatatgcttgcggaccatttgcatatatttggaaaaatgactgttcaagtcctttgactgtttttcaatcgcattgtttggtttttgttcttcagatttagaacaaaaacagaattctttatatgttctagatactacccctcatcagatacttaattgtatgtatttttttcccattctgtgggttggctttttactctgttgatagtatcttttgatgcacaaaaatttgaaattgacatgaaggcaatttgtccattttttcttttgttgcctgtgcctttcatgtcatctctaagaaatcattgtcaaatccaatgccatgaagactttgccataggttttcttttgagttttatacttttaggtgttacatttaggtctttgattcatttaatttttgcatataatatttggtaagagtccaatttcattcttttgcatgtggatgtacagttttcccagaaccattagtttaaaagactatcttttccctgttgaatgatgttagcctctttgttgaaaataagttaaccatatttgtgcaagtttatttggggattttctgttcaactccttggtctatatgtctgtatttcttcaagtgccatactttttttgattactgtagctttatagtaaattttgagatctggaagtatgactccttcaactttggcctttttaaaagttgttttagctatttggggttcttgaggttttatgttaatttttggatggatttttctatttatgaaaaaattatgattttgatagattgcattgaatctgtagatcactttgggtattattgacatctatcaatattgtcttccaacccataaacagagaatatctcttcgtttgtcttctttaatttctttcaccaatgttttgtggtttttatttacaagtctttcagctccttggataaattaatgcctaagtattttattctttttgatgctattgtaaataacattgttttcttatttttcaattgttcattgttagtataaagaaatgcaactgatttttgtgtgttgactttgtatcctactacttcactgaattcatttatttctatttttttggaatttttaaggttttcaatgtataagataaatcatctgtgaacagagataattttacttcttcttttccaaattagatgccatttacttcttgtcaattgacctggctagaatttattgtattatatgcactagaagtggtcaaagtggccatccttgtcttcctgacgttaaaggaagagttttcagtctttcaccatttagtatgagatttgctgtggggttttcatatatggcttttattttattgaggttatttccttctattcctagtttgtttagtgtttttttttaatcgtgaaactatttatagtttgtggagtgttgattttgaaaagtgacttttctgtgtcaattgaaataatcatgcacgttttttcttcattttgttaatgtggtgtattatgttgatcaactttcctatgttgaacacattcttggattctgggaataagtcccagctagtcattgtgtacaatcctcttaatatactgctgaatttgatttgctagtattttgctgaggagttttgcatcagtgttcacactattgcaataagcattgcattaatgttcatgatctgtagttttcttttcaatgtgaattctgttgatcattcaaataatcaagctttggtttcattgattttgtctattacttttccatcctccatttcacttacttccatgctaaactgtattatttccttctgctacctttgagtttagttttttttcctagttccttaagttgtaaagttactttgttgttttgagatccttcttgatttttaatatatttacagctataaattgtgtctttagcactgcttttgctgtgtctcataagtattggtgtgtcccaaaaatatgttccgttttgttttcattgatccccaagtagtttccaatttcccttgtggtttcttctttgatatatggctcgttaaagagaatattgttaaatttcacaaaaatatgcgaatttttcagttttcctaactgtaacggatttctaactttatcctgttgtggtcagagaagatactttgtatggtatctattttaaaatctattgggatatagacatatggtctatccttgaaaatgtcctatgtgcacttgagaaaaatgtgtatgttgttgagtacagtattctgaatatgtctgttagatatagttggtttattgtgttaattcctctaatttctaatgcatcttctgtctagttattctgcttgttattgagagtggcgaattaatgtctccaattattggaactatctgtttcttcctttaattttgtcagtttttacttcacatattttgatggtctgttattaggtgtgtaaatgtttataattattatatcttcttgctatagtagatcttttatgaatgtataatcttttttgtctcttgtaacctcttttgatttaaagtctattttgtctgatattggtatagccacccctgctctttttagattactgtttacatgaggtattttttcatccttccacttcaatctattagtgtctttggtgctagtgagtctcttgtagctagcacatggttagatcatgtttttctaaaaatgtattttgccaatctctatcatttgattatggagtttaatcatatacatttaaagtaattactggtaaggagggacttctgtcattttgttatttgttatttgttttatatcttttttggtccctgatttattgcattatagtattctttgtatttatagttgatttttggtagtgaaatgttttaagtcccttctcatttccttttctgtatgttttataggtattttcttcgtagttaacatgggaattaaatataaaatcctgaagttataacactctaatttgaatttataccattttaactttaataatataaaaaactactcctttacagctctgttcccatccctttcagttgatgtcacaaaattacatttttatacattgtatttccaaaacaataaactaataatattttaagccattagtctcttaaattatataaaaaacaaaatgtggaattacaagccaaagttacaataatactagcttttataattgcccatgtatttatttatcttaactgtgctctttattacttcctatggctctgagttaatgtctaacgtccttttgttttgacctgcagaactcccatcagcacttcctacagagaaagcctagtggtaacaaactccctcagcttttgtttatctgagagtgtcttaatttctccctcactttttaagaacagttttgccagatataagattcttggttgaaatttccttttcttttgcactgtatcaaccactgctttctgccctccaaagtttccaatgagaaatctgcagataatcctgttgtagagcccttgtatataatgaatggcttctctcttgctgcttttaagattctctgtctttggggtttgcagtttgataataatgtgcttaaattgagtttgttgagctcctcagatgtttacgtctctcatcaaatttgggaaacttttagtcattatttcttcaaataatctctttttccctttttcactctgctatccttctgggactcaccacaatgcatatgttggtccacttgatggtgtttcataggtgtcttaggctctgttgacttttcttcaatcttttttttttctgttcctcatacttgataattttaattgtcctatcttcaagtttgctgattcttctttttgctcaaatctagctttgaattcctctagtaaattttttatttcagtttttatgcttttcagatccagaatttatttttggattctttttaggtttccatctctttattggtatttctattttgttcatatgttattttattgactttatacatgtcttcctttagttttttgagaatctttaagatagttgttttgaagttttgtctagtagatctgtcttcaggtcttcttttgggaaatttctatttatttttttcttttgaatgaaatatattttcttatttcttcatatgccttgttatttcttttctgtcgaggtggccatttgaatctaataatgtgctaactctgaaattcggacattctttttcttaatgtttgctgttttttctaaattattattgttgcaggctgtttctgtgccaaatactggtctaaggcataaaattaagaccttctcagatattttctgagcctatgttttcctctgtgcatacacactgactttctaattttcctatatatgcggttgcttttgaatgccctagtcctccatgactggctcaaaaggggaaaaaaagagaaaagtaaaagcgaggagaaggcaacatcccttcaaatcttctggaagtcactttagtcagaaggtgaggggcttgcaacaatgggggaggtatgacaagaatggccacagactctgtctgtgcttctgtaatcagaagcagcaattagtgatcagaacacacatctacagtatttgaagaacacagccctttttggccactctggcttccgtactctattaagacccttagaaggaaaatacccctaagaattgtataattataatttcaacatgacaggcacatatatacatcagtgtacatttacatgcaagatagacatgaatgaagctttaataaaagggaagggtttttaaaataatttttataggactatctaggttggttgagtttgtgcactgcacaattctaggggcttcagtgtcaagtgcacattcaatttgtggcaccgagatgagatatcaggtgaaccctctgagccatgaagttggggggaattctattgttggaatgctgagatatcacagcccaaccatctaaaaatatatttgcctaattgccaagatttccttatatgttccctgcctacttgctgctacaatgacttctagagggagagaatcagagaagagttctggtgacaaaatggaaagtggttatacagcttcaaaaagatagaatgttcattctgacaggtaggacacaactttgagtaaggaaaagcagttgccattttcagaaaaaaaggaacatttggactaaacaccctgaaaaattttgacagcaagaattatgagattggggaaatatgtagtaaaggaagtggtggaaaccccatccctagagccatttgaaagtcaacgggataaggaagtagaaaatctattctaagaaagaatcttccactgcttcccctgggtctgacagatgacataatgggtctcctccatctctgattgttacagttctcagactttatgtattttccagggttttataatgttgctgttagaccaggctgcccacctccctctaaaaagaaaaaaaaaatcagactccaaacaaaccctaaactagttgctccaaggagtgcaaagatataccaaatggaaattgtgaatcataaaattctctagtgtgaatttcattattccctgaagatagtctaccaagatgagagacgttgtcatcattttactttatttatctgtttttctctttctggtacattttcatttcaggagagaaaaaccaatgggacagcaaattctcatagaactggctgaaaaggatctgtatttttttcttgctgtccacttattttccaacaagaaccctggctgtctttgtgatgactcaggaagaggaggatttgtgcacagccaagaggaaataggacctccatatttgccatttggatgcagagaatatgaacagacttctctgagacccaagaactgaagaaattgttgggtcctctcagtaaagtgggtctaagaagcatgtgtgaatgagtgttggttgggcatgcaggtgttgttaattgtgtttttgctcttttttatacatatctttgtgttatctacttacagttatagactcagatatggaagaaatctgagtctcactcagacaatttggggtttcattcttttttatatgtaaaatctaagaaataccctagtagttaagtgactcgtctgcaccgcccagttttctctctgtggcagcagctccaagggtaatctagtagcaaaatctagaaccatggcaaaaatgcagagagagaaatatatattttcatggaatcagtatacaacactaaatgtaactggccttttgggaaaaaaaaaaaggagggggcggtggaaacctggtctaacaatcgtctcagccctgtctggattgtggaaaagggcccatagcccaggcgctcttccatgattacatattaacatacatgcatgttggaaacctactatatatataattgctttatgtccacagtagattttaaattctttttttttccctagcaaacattcttctagagactctcaactttaatttgaaaaaaaggtaaaatctcatttgtcttgatgagggctacagtgtacccctagtgaccagatattccatactgaaatcattgctgtttctaactccagggccagtgaatctaggactagtgttgaaggggagagtgcagaatgaagaactattttccactcagttttgcctgtttacattttactactagaacctctcctttattgcttcgtttagaatctggattagcaaagcgtcaggagctttcatgtttatcacacaatttaaaatggaatgaaacacacaccatcacaaagcccaggtgttggattagaatttttttttttttgctttaaaaatggtttttatttctatttttattttatttattttttcttcaactttcattttaagtcccagggtacatgtgcaggatgtgcaggtttgttacataagtaaacaggtgccatggtggtttgctccacagatcacctaggtactaagccaagcatccattaactatttttcctgatgctctccctgcccccacccccactgaaaggcccccgtgtgtgttgttccccaccatgtgtccacatgttctcatcattcagttaccacttataagtgagaacatacggtgctcagttttctgttcctgcgttagtttgctgaggatagcatcttccaactatccgtgtccctgcaaagaatgtgatctccttcctttttatggctgcatattattctttggtgtatatgtatcacattttctctatccagtcaattattgatgagcatttggatcaattccatgtatttgctactgtgaatagtgctgcaatgaacatatgtatgcatgtgtctttataacagaattgtttacattcctttgggtacatacccagtaataagattgctgggtcaaatgttatttctgcctttaggtctttgaggaatcactattttgtcttccaccgtggatgaactaatttatactcccaccaacagtgtaaaagcatttctttttctctgcaaccttgccagcatctgttatttattgactttttaataatggccattttgattggcgtgagctggtaactcattgtggttttgatttgtatttctctaatgatcagtgatgttgagctctttgtgtatataaattgtgtgattccaactcagtgctgtctaaccctcaaccctccttgccctcctctcttccgttccccttcagaaatgtctgaatccagtttttcttcagaatactttctccaggcaatgttggaagttttctttccaacttccagtcttttctgctctgtcttgatcaataaacgtgttcttttgcttgtagcctagggccaaagcctgtgtgttaaagtgatgttgtcacaaaatgcctggtgatgtcataaagcactgggagatctggcaaaagcagcaatcctcatttttatgtccccagaaaattattggtacccaaagggccatcacatcttctgtctatgcaccagttgttgtagaaatagtgaaggcctagttaacttcgtgcatttacatgtttgacagatttctataaaagactgtgtagagaatatagatttaaggagccgaagttattaaaatggggtggggtgagaggaactaggccaataaaagcagacaacgtggttttttaatcctttccacaggaattcaggcaaaaggggaataaaataattctacagggtcacttgtaattcagcttaaactaagctcaggaaactgaataatatttctcagaaggctgatttatgcacttaaagtaactaagtcccaggtgtcataggaagtaatacaacatctagcaatgtcctagcctgcatgctcaaactagctgcctaaataaatttctaacttctctttaaaacatttcagagtgagttctactgggattgctacagccctagattctctgttagaaggggctgcctcagtaagaaaagcccagggacctaggtaggttctgcattataaacaaattgtgttccaaagtttgtctgtgaatcatttctttggaaacctaaacatattttctttacagaaacagaggtagacacagttaggctccctggctttcataaccctccaaagtctatttaaaccatatgcaggtcaaatcccctctgctacataaaaactagagaataatcacttaatcacacaaaccaagggagaggagatcagatttaataaatgttttttttcatttattccctcccccctccatttatcccttaattagaagagggtaagtgatagatggaaatttggtggatgtcctgacggagatttccaacactttcaaggattttagacgccaatggcacagattctttattaactaattatgcataatttatcttttatgacagagaaaatagcaaggaaagtggctcagcagagaaaggaaagggaaatacctagcaatttctatgggaaaaaaaaggccctttcagggtaactgttattgctatatcaggacatcttggaagctaagtgtttcaaagtcaaatgtacttggagccatgaagcttcatttttctctttggttccagtgacctcacttacccaggtctttattaggcatgctaataaaaagtaaaataaaaacagttttggcagtctatgtcttttttttccctcaaaaatgccctgaagtggtggtacagagtggaattaacacatcctaaatgcaggcagtcggaaggagacagaagagaaacaaagggctggataccccacatactggataagaagagcctgataacggagttgactgtatttggaatttgcctgtttccttctgtaaaggagacagggagctgaatgaagtgcttatctaagaagtgtcagaacccttgcgcaatgttgttacaaggatgttagtaaagcagggggaacgttttggcaggtacagatgggattctgtttgacggaatgtattttcttgctatgtgttaatctgtgctcttctggtatcaagcccttaaggagtttggataaagcctttagggaacccacctttaaccctctctttagtatacattacaaggaatttagcatcccatatgtgacacggatggaactaaataattgcagtggggtgttgggagaaaatcaccctaaagcaggcaactcctgcctagaaattatagctggagaaatctggctaagcaagaaatctctggaatattccacatgagactaagggataggttgatggatttctaacaggttacacccaactccaagtgagaagtcatttgaaagagtcccagctggacgtcacaggcccctaatgagagaacacaatgaagccagtatatccacatgaaaaagttgaattcaaagaggactctaagagggcctagacaaagcagtttggagtttcagaggagcaaacaccattccataaggtcttcaatcttaacccactgaaacaatgtaaaagtcttctcttccctctatttaagtcagagcaagtttttagcagaatttaaactcaaaagatgaggaaaaagaccacattccacaagagtaactaaaatgatagtaaaagagaagcaatttttgtctccataaaaataaccttggagttgcagttcacagcacctaaaaagcacactaccatgtacttagcaccaaaggaatatcagatgaagtgagatttctaaagtaatgcagatcaagggcaaagggaatagctcgtggtcaagaacaaatgtaaaggaatgacatgggtaactacagaatcaagagagtcacccagagggaaagaaaactcattggaatatgtgacgggcaggaattagtgatgaagagagaataccaaacaagaaaagggagacgtggggcattgagaatggatggcaggagataagctactctattccctgtgggtttgatcttccctgataaagaaaattgtgtccaaattcggaaggataaaataaacactgtaaaggagaaactgaagcccaagataggtgaatcatttcaaaaggcatctagctcctaaaatacatgcaaatgtttaggtctagatacatttgccctaaactacaaagaaaactttgcagattgaatttatttttttaattacttaaaaataattagagggggagccaagatggttgactagatgcagccaggaagagcttctccctcaaaaagagacaagactgcccagtagactggcacactctgcacagatctttagagggatggcattgagagtggacagtgggaggacatggaccgtgggctgaagggtggggaggggaagctgggaacctcgcacaagattcctgagcgctaggactctttcctggccctgagcaactcctactgaaaaggtgagtgaaacaggtgtggagtggcccactcttgtaatggacctctggtatcctagccacaggagaccccaagacccccataaacatctgagctggcaggaggaactgcccaaagagttggcagagacagaactccagcctgcccatagccccaaaggtttggcatgggagtggctggagtagagagtacggccatgggcacccattccccaggcttgccatattcttctaggtggttctagcctttgttgactgtctgacctgggcagaacagggctgtcttgtccctgggatagggacagtctgacctgagcaccccctgtcttccagcctcttccagggtccctgcgtggccacatctgcttgcagtgcagcctcagcttgccagtgaccactgccatatctctcttgccagcagaccctgcctaacagagcactttggcagatagaccccacccgcacctaccagcagccttcccctgccggagcacacttgcttgcagcctcccctggctgctccactagtgcacacacgtgcatcaaaccccacctccctgccagcatgcatatacttggggacgcctaccatctcaccagagtgcttttgccagcatctcctgtcagagtgttgttgccagcagactgtgaacaccttgatgcctctagcacagcaggtgcttgacttggagggaccagagaacaaagttgctggcctggtgccagccctacaagattagagcatgtagtctaggaatactgagctgagctttggccccctgaaagcattcagaaatgaagcccatcaactaaacctaacttatatcatgaccaaaccctcaagggcgcaaagaatataaaagcaaaaggcttcatttgaaaggcagcaacttcaaagattcaaagaacatcagcccacacagatgagaaagaaccagcacaaaaattcctgcaactctaaaagccagagtgttgtcttatctccaaacaactgtactagttccccagcaatggttcttaaccaggatgaaatggttgaaatgacagacatagaatttggaatctctatggcaagaaagcccatggacatacagaggaaggttgaaacccaatctcaggaaatcagtttgagttgaaagatgacatagccattttaagaaagaaccacattgaacttttggaaatgaaaactgcattataggaatttcagaatttaattggaagcactaataaccgaatagattaagctgaggaaaatctcagcttgaaggcaattccttcaaattaatggaggcagacaaacattttaaaatatgattttaaaaatgagtgaaacctctgagaaatacgggattatgtaacgaaaccaaacctatcatttactggcacattcctgacaaagatggagagagagcaagcaacttggaaaacatatttgaggatactgtccatgaaaatttccccagtctcactagagaggtcaacatgcaaattcaggaaacccagagaacccctgccagatgctatacaagatgacatagagtcatcaagacacacagtcatcagattctccaaagtcaccacaaaatttaaaaattttaagggagctagagagatggtgcatgttttctgcaaagggaaccctattaggctaacagaggatctttcagcagaagccttataggccagaatagactaggggactcatctttaaaaaaagaaattccaaactagaatttcatatccaaccaaactaagctttataagtttataaggagaacaaaatcctttcagacaagcagatactaagggaattcattaccaccaggcctgccttacaagaggtcctgaagggagtgctaaacctgaaaatgaaagactgataacccgccaccacaaaacacacaagtaaatagaccactgacgttataaagaaacaatacaatgcaagtttacataacaaccagctaacaacatgatgccaggatcaaattctcacatatcaatattaaccttgaatgtaaatgggctaaacaccccactaaaaagacagaaagtggcaaattggataaagaagaaagacccggctgagtgcagtggctcatgcctataatcccagcactttgggatgccaaggtgggtggatcactagagtccaggagttcaagaccagcctggccactatggcaaaaccccatctctactaaaaatacaaaagttagtggcacatgtctgtaatcccagcttctcgggaggctgaggcatgagaatcacttgaacctgggaggtggaggttgcagtgagccaagatcatgccactgcactccagcctgggtgacagagggagactctgtcaaacaaaaaaaaaaaaaaaaaaaaaaaaagaagaaagactcaattgttagcctgttgatgctgtctgcatgagacccatctcaagtgcaatgacaaccataggctcaaagtaaaaggaagggaaagatacatcaagcaaatggaaaacaaaagaaagcaggttgctattcttcagacaaaatagatttttaaaccaacaatgatcaaaaaggataaataagagtattacataatgataaggagttcaattcaattcaacaataaagcttaactattctaaaggtatatatacctaacactggagcacccagatttataaaacaaggttttgaagacctacaaagagacttaaataaccacaaaataatgatgggagacttaaacaccccactgacagtgttagatcactgagacagaaaactaacaaatatatttgggacttaaacatgacacttaaccaaataaacctaacagacatctacagaatacttcacccaacaaaaacagaatatacattcttctcatttgcacatggcacatactctaagactgaccacatgctcagccataaagcaattcttgacaaattcaaaaaaccaaaatcataccaaccacactcttgtaccgcaacccaataaaaatagaaattaatgagaagaaaatctcccaaaccatacgattacatggaaattaaacaacctgctcctgaatgacttttgggtaaagaatgaaattaaggcagaaatccaaaaattctttgaaactaatgaaaatgaagatatattgtatcacaacctctgggacacagctaaagtagtgttaagaggacagttagcactgaacacctatatcaagaagttagaaagatctcaaattaacctaacatcactctagaactgaacaaagttgtgacacaaaaattcatacaaaaggtcaatgaagccaaaattgatcatctaaaagtataaataaaattagtagaccactagctgattaataaagaaaaagaaatccaaataaacacaatcagaaataacaaaggtgacatcaccactgatcccacaagaatacaaaaaaccctcagacactattatgaacacctctatgcatacaaattagaaaacctagaagaaatagataaattcctgccaacatacaacctcccactattgaaccaggaagaaactgaaatactgaacagatccataatgagttttaaaatttaatcagtaacaaacctatcaaccagaaaaagccctagaccagacacattcacagctgcattctaccagacatataaagaagagctagtaccaattttgctgaaattatttgaaaacatcaaggaggaaggattcctccctagctcattctatgaggccagcatcattctaataccaaaacctggcagagacacaataaaagaaaactttaggccaatattcctgataaacatacatttaatgctcctcaacaaaacactaacaaatcaaatccagcagcacatcaagaagctaatgcaccacaatcaagcaggctttatccctgggataaaagatttgttcaacatacgcaaatcaataaatgggattcatcacataaacagaactaaaagcaaaaacaacataatcatttcaatagattcagaaaagacttacagtaaaattcaataccccttcatatctaaaactctcaacaaactaggcactgaaggaacatacctcaaaataagaggcatgtatgacaaacccacagccaacatcatactgaatgggcgaaagctggaagcattccctccgagaactggagcaagacaaggatgcccatgctaaccactcttattcaacaaaatactggaagtcctagccaaagcaatcagtcaagagaaagagagaaaaagcatccaaataagaggaagtcaaactatctctcttcacagacactatgattctatccctagaaaaccttaaagactctgcccaaaggctcctagaactgataaacaacttcagtaaaatttcaggatacaaaatcaatgtacaaacatcagcatttctatacaccaataatgtccaagctgaatgccaaatcaagaattcaatcccattcacaatagccacaaaaacagtaaaatatctggaaatacatataaccaaggaggtaaaagttctctacaacaagaattttaaaacactgccaaaataaatcagagatgacggaaacaaatagaaaaacattccatgctcatggattggaagaattaatattggtaaaatggccgtactccctaaagcaatttacagattcagtgctacttctgtcgagctaccaatgtcacttttcacagaattagaaaaaaatattctaaaattcatatggaaccaaaagagaagcctaaatagccaaagcaatcctaagcaaaaagaataaagttggaggcatcacatgatccaatttcaaattatactgcaaaggtacaataagcaaaacagcatggtactggtacaaaaaccgacacataggccaatggaacaggttagagaacccagaaataaagctgcatgcctataaccatctgatcttcaacaaagtcaacaataacaaacaatggaaaaaggattcgctattcaataaatggaggtgggatatctggctagccatacgcagaagattaaaattgaaccccttcctttcagcatacacaaaaatcaactcaagatgaaggaaagactttactttaaaacttgaaaaacagtagaaaacttaggacatacccttttagacgtaggccttggtaaagatttcatgatgaagtctccaaaagcaattgcaacaaaaacgaaaatagacaagtgggacctaaaaaagagcctctgggccaggcgcggtggctgacgcctgtaatcccagcactttgggaggccgaggcggttggatcacaaggtcgggagatcaagaccatcctggctaacacggtgaaaccccgtctctactaaaaatacaaaaaattagctgggcacggtggagggtgcctgtagtcccagctacttgggaggctgaggcaggagaatggcatgaacccgggaggtggagtttgcagtaagccaagatagtgccactgcagtctggcctgggcgaaagggtgagactccatctaaaaaaaaaaaaaacaaaaacaacagcttctgcagagcaaaagaaagtataccagagtaaacagacaatccacaaaatgggagaaaattatttacaaaccatgcatctgacaaacgtctagtatccagaatctttaaggaacttacacaaatcaacaaaaaataaacctaatacaaaatgggcagacacgtctcaaaagaaggcatacaagtggccaacaaacatatgaaaaaatgctccacatcactaatcatcagagaaatgtgaatcaatactacaataagacaccatctcacaccagtcagaatggttattattaaaaagtcaaaaaataacagatgttggcaaggttgcagagaaaaaggagtgcttatacacggctttggggaatgtaaattagttcagccactgtgggaaacagtttggagatttctcaaagaacttaaaatagatccagcaatctcatcactgggtatatatcaaatgaatagaaattgttctaccaaaaaggcacatccacacatatgttcattgtagcactattcacaatggtaatggaatcaacctagatgcccatcaatggtgtactggatgaagaaaatgtggtacatatataccatggaatactatgtagccacaaaaaagaacaaaatcatgtcctttgcagcaacacagatgaagctggaggccattatcctaagcaaattaacacaggaacagaaaaccaaataccacatcttctcacttgtgagagctaaacatttaatatatgaacactaaaaggaaaatagacaccagtgcctacttgagggtggagggtaggaagagggtgagtcaaaaaaccagctatcatgtgctatgctcattacctgggtaatgaaatagtttgtacaccattccacagtgactcacagtttacccatgtaacaaacctgcacacgtatcccctcaacctaaaacgaaagttaaaaaattaaaaataattttagtaataggaaagtacaaagaaatatacagggaggctctgtgcaaatttcacccagcctctcccagtgtttggagatacaatttttaaaaccactgacgttcgtttttgagaatttgtagagaacagcaggaatggtaccaacaaatcaaatgatgaacaaacattttcagaattttcaaaagtgttgagaaggtagtttctgaaatctattcttttgtggtaatgttagagatgtctgttaaattctagaaatggttaatcaatttttggattttttatgatgcagccatactaggaaccagaataatctcactgtgaacaagttggaccatttactttttttcgagaaaatttcttgactgataaaccaaattactctttgtctacattacatctgttttgtctagcatatttaaaaacctcttttattatacatctattgacaaattggttttaactatagtttagttagatgagttcatagcaagatactaacgaatcaggatcaaaatggaaagtctgtctaacagtgtgtcacagggctttgcacaaactagtgatgactgaacaaaaatggaaaatgactttgatttttggaagactaggttgaaaccaccacgatgaattttgattcttttaaaagaaccatactatagaactacaaggtctgagaaaagcgctttaatagcaataattgtaaaaattttggagttctagttgatatttcaatatgaatcataagtggggaaaaactgagtaagtttagccattatgcatctatcgcaagagaggataaagtcacactgtagtttgcactgtcaaaacctacctggaatatcgtgatcaactacaggtcccaattttaagaaggacattgacaaatcattactcacctaaagaaaggtggagccagcaatggtggcttatgcctgtaatcttagcactttggaaggctgaggtatgaggattgcttgagtccagattttcaagaccagcctgggcaacaaagtgagacactgcctctacaaaataaataaaaaattagccaggcatggtggcatgtgcctgtagtcacagttacttgggaggctgaggcaggaggattgcttgagctcaggagttcaaggctgccatgagctatgatcacactactgcactccagccagggtggactctggttctaaatttaaaaaagagagacagagagaaaggtaagggttttggatacactttttaaaaagagattgaagcagctgggtttatcatagttgtcttcatacatgggaagggctatgatgtcatagattagaataattctctgtggcctaaggtgtagaaatagtcccaaaacatggaagatgcaataaatactcttaagttaatctaaggaaaatattttacaagctagagacagaggcatcatatttcagcagatcaattgatttgagtgtttgaaacataagggaaagatgtggaagaaatatatacatttgggaatcggcctatagtttaaatgatacaactagagagtgtgtgtagatcagatgttcacttcccaggatatatttcatcctagggtatctttaatcagctacagggaagccacattttatttgtatgtgcaattctccagggagatgatctctaattaatagttcccagtgttctaaagatcccataaccataaaatttaaactttccttacatgtagtcagacaaaaaaaaacattgaccaacaaaagggcacttgaggtgcactaacttaaagtgcaggtagaggaatgagaagaaacaacgagagaaccataaggacaactgtgtaaaaatacagtgacagaattcaatgaaaggaaatttaatggtgagagtgaacagcagtttgaatgctttggaaaggtttcacatgacaaaactcagaacatgcctcgaagaggtgagacatacatctcaaacaaggtaaatgatatgcaaagcaacaacacaagagctgtcaggaagccaagtggcagaccaatttaaaataaatggtgcagaaaaagctgtgaggtcagaagaaggaaagttttagtggagagagctgaaggttgaaggaaacccttgtacagatggtcgaacataagctagatttgcaagtcattacacttgttattttattccaatgaatggtatttttatagttaaacttctttcatcttattctgtctcctgagtaaaaacacatccttcacagaagtacctacatgtttgaggatgactattacgtctctctcgaccttcttgcctctaatttcaagaattctttccaatgaagagccccacagaacttgattagaagtcaggatttgacttgagaggatatgaagagcctcttctagattctgtgtgagttgtatcatgaccccctgaaaagtttcaagaatagcattttgcatcacaatatttcatgcagaaaagactgggaaaaggaaaatgtaagtctcttatgcttggtctctggccacagcagtggaaatccagaggaaggggcagacctgagaaacactggcaaggaaggattgcagagcttggtcatgaacaggatgcatgatggctgagatagcagagattgaactctccttcactttgtgacggttttagcagccccagtgctcagacgggtgcaacttggattaaagaccagcattcagttgccacatctttttattacacaagcagtacaggcctgtaaaagacaaccatggaagggaatatgaaaactacagagcaaggaatattaaaagaatcttttgactggattttgttttctggtttctgaaatgaaagtgaaagtgtccaaaaggatctaaggtgtctcttacagagtttggttcagaaaatcctctaaggattagcttaggaagcccaaggaactgtgtgtcaatcctctgcctatctgttgtttgtcattgttgtttgtttgtttgtttgttttttgagacaaggtctcactctgccacccaggctagagtatggtgtgatcacaggtcaccccaggctcaagcaatcctcctacttcagcctcctgagtagctgagactacaagaacacactatttattttttttattttttatttttttcattttatttttagttttattttgtagagacagggttttaccatgttgcccaggctggtcttgaactcctgggctcaagcagttgtcctgccttggcctcccaaagtgctgggattacaggcatgaaccaccacactcagctctctgtccatctctaaatgggaacaggagaataaagaagtgggggaaaaagggacacttcactcagaagaaagggcactaattatctggcacaggtatctgaaatgaaattgacatttgttgagcctctactagggatcaggcacttaatgtaccttgtttactgtcttggttactaatagtccttggaaagactctttttcctatggagaaataaacagcctacctgtacaggatgcatctgtcctctctcagagaaataatgtctcaagaaaaagaatcatgagactttaggggaaaggctagtttcagaatataatctgtgcaaaaacgaggttgaggttagaccttatgagcaaagcatatttgttcacagtggatagaatcataagagatcctgtggtctccttcctctatgaagataatgtactactgtcattatgccatccttttaaaacaaggcacccaggcccaggcaggagagcttggaactatgatggcaacttgcttcctgctctgtgatacctcctaccagttttctccaccctgcaagtctccgccagagtttgtaaacctggagtaccagtggcatatttcacaccctgacttctacattttgcaggaatgttggaacgatttctactgtgcattctcagtagaaatcaacttgcatgcactgacttatttgacctccatatatctgacattttccatcccagttgaaaagacaggactactgtatatcactacagtttcctcagagtccatgaggaagactcagtaatggcagagagtgggtaaaccaccttctctcagagatgtagcacttgaaagaggttgcttgcttccagagcttgctggaaaataaatgtaggtatatcctttcatgctgggtggatttagctgcattccccagaagactaatatttcttctgagggttattttcttgaaatccttatgaatgtttgaaaaggggtccctatagagaaaactacctcagtcacatgcacaagggcctctgaattatgttgcaatttctagtgtgaatgctatgttagagtgcagtatcatgggtgacgatgaaaatgcacccaagtcaagaaatttaaatttatgatttcagcaacagtcttaacttttcccactctcgtatgctcagtgctttatgttattgtagttccagtgaaatttatgcctcagtgtgcattgcaagtgagttatggctactctgggaatgttaattttgcatttcctgacttctgtgtgttcaaagggacaagctttcaaaactggcctacaaaatagcacaccagaccagctgatgctgtgtacctccctgtgcctgtggaatgggagtgagaagacctcacggctgggtcttctttgtgtctattcctaggtctatattttacaggagcatggctcaggtggggaatgtcctgccttacatgggcattcaatccaggcaagaagtatgaggcaatggaaaaggaagatcacatggattacttgttatttcctcttctttttctttttctttaaagacagggtcttgctctgtcacccaggctggagtgcagtggtgtgatcatagcttactataactttgaactcctgggcttaagtaacttgttgttattgatagctatcatttattgagcacctactctatgccaggaattgttctaaatgtttcacttttgtgtttcatgttgctttttatcaaccatttgaggcaggttttatcatcccagcactgagtgagatagacagtcgtaagtttgctcaaggtcacctgactagtagagccagaattcagatctaatttttttttttttttttttttttttagatggagtctcactctgtcgcccaggctggagtgcagtggcatgatctcggctcattgcaagcttcgcctcccgggttcaggccattctcctgcctcagcctcctgagtagctgggactacaggcacctgtaaccacacccagctaattttttgtatttttagtagagatggggtttcaccatgttagccaggacggtcttgatctcctgacctcgtaatccacccgcctcagcctcccaaagtgctgggattataggcgtgagccaccgcacctggcctagatctagttttactgaccacaatgtccatgctctacctggggcttgcctctccagtccccaagtcctgaaatgcaatttcagctcagccctcgctagctgtgtaattttcactaggcctttaaccttggtttcttcattggtgagacaaagaacatgttggcataagtaggatcaaatttaattatgactttgctattttcattgctctctgttaaggacatcaagcccacaattgttggttcagccaaagagaaagggccaagaaagaaaggtctatctatatttatcattggttacatgctaatgagggccagcatttttgcctgttttgttcatatttgtccagtgcctcgaggagtgcttagtatagagacattcagtattgtttgttgattgaataaattatttccattatgccatctctcaccccacagtctctcttctgtttcctatcatcttgggcacagttgtgtgttctggacgttggacattttctgtcttctttcaaaaatcgtcttgcccaatcactacagcaacttactttctgcttaggaactgacatcttgctccagaaacaatttagtgtttctactcttgggaatttgcaaagcaacagatgttttctgcatactgtatctaaacccacagcaatttgaatagtgagacttcctgatactgtgccaggctctgaggaatagattttggagacagatatttggcacccctaaaattttagtaggcctaggtccagcctcgtccatgtcagtggcagttgggccaaattcaccgagtcagacattcctgccctcaggagaccccaccaccccacaagctgtggtttctaagaagcactgaagtttgtatatccagcacctttgcaattgtgttagtaacttcttctgccttatgaagaagttttctgaaatgccttaccctttctgaaggagcttttcaggttccagacattaattcttgtgcttctaggtcctatagccaacaatcagcctcaatacccttccaatcatgtccacattaccatccactaaatttggggctctctgctgctttgtgatattgtcatctttttcttgctctgctggagcagatgatctcaatatcattatccttatggcaaggttttaaaattcactctttctaaaatgactcattggcactcctataaatggtccattgcctctagctcatgaggtctcactgcactcttcatttcttagcaaggctgacttcctcccagaatgctgttcttgctcctgataactcctagactccctcactcctccccttcccagttccctaagtatacttgctcagttttgttctgacattaaaaaaggcaaggttatgaaactagtgaggaagtaacttttagtggtgaaaacaagaccttgaggtataaatcacaactttgccacttaatatctgggtgagagggagcaagttgttattgctcttttagacccagtttctcatctgttgagctagacaacaatgccctttttgtggggattggtctatcattggtaagtgcccattgaatgtttcttattcctagtgaataagagtcatactgcagatttcctggaagaagtattttattgacaataaaaaaataataaaagagctgtcattcagattttttttaaggggactgaagggggaagagactgcagaaagaaatattgtcataattgtgaaagttactgtgtttagtaatttgactttctttgtaatcaataaagtaaagaaacatattttggtttttcagtgtgtttttgagtgtgtgtgtgtgtttcatttgagcttaaagtttctttttcttgtcagaagcagtaaattcattcatccctttcaacaaaattttagagaatgcctattgtgtgtcttatactctgtaaagtgctgactaatgcagactcccatgcaggcaaaacagaaaatcacaatgaatgattataattgtgacaaatgccaccacagtgtctcatagagagttcatttttgcggcctcctgcttgtgttacaggaaatggaagcatttatgggagatgttctgaaggggatttccccctggctcttctccctgtcagaaggggacatctcctttgaagtgtctcatattatgggaagacagagctatccagaaagcaactagctgaagcttcaggcagttgtagggaagggagggcacttgggattgttgtcctaataatttaaagaaccctcagaagatttcaaaagccagggagatgtgtgccatgaatatgaagccagttttttggtttttgatttttgttttctccacgcatttgcacagatgcagcagggatggatgacgggtggtgtgatgtcactagtgaatgatatcaaaggaaagagctctgggtaatcaccagggctagtctatttatctggatagacttgtttagacttgtttaagtctaaataagtgttgttcgttagtttgttctggtagctgaatatatctttggaatctaagattctatatgcacatatgtacatacatgtccctttacggggattccttgttcttcagctaaatgccatctaacaacaagctaattgaaaacagtctcagtatctaggtcagtgaattaaatggattccatgccaccacccatccccaacacaacacacatatacacacacactgacacactgcagatacattctttcttttttcttttttttgaagatgagatctccctctcttacccaggctatagtgcaatggtatgatcacagctcactgcagcctcaaactcctgggctcgagtgatcctcccacctcagcctcctcagtggctgggactacaggcaagcaccaccatgcctggctaatattttacttttattttgtagagacggggtatttctatgttgcccaggctggtcttgaactttgggactcaataaatcttcccactacagcctccaaaagtgctgagattacaagtgtgagccacccgccatacctgtctcagatacattattttagcaacctttcctcgtttaatttttgcgatagtccaaattctaaatgttctgcttaatttttggacattgtgtcaaaccatgtgtcctgatttggcacttacaattatacaatctttccatgaatattaaatctcagtatttctctaggacattcaacagtttctttagtggcattgctttgctgtcccagtagtcctggttttctttttgtccttggtagcccccatcaactctgcttttcaatattccctaatgaaatacctctccagggattggtagttcccaccctgatgtcaccatctgaccctagagacctaaagtagtgttacagtgagtaaggtcggagtatgacaagacaaccctctggaggtcatcccagttctgtagtttgtctccaggtccttctcatgagtggatcgtgaatagccaggaaagtagaggttagctattcctatgatctgaagttctccaatctaattgtgaatcttgttgtgccaccttgaatgagtcacccaatcctctgtggctcagaggattgggtatcctctgaaaaagggggatacgatttgtaccagcttcatggtgttgctgcgaggatgaggtgagttaatacatttaattagaccagtgactggaaaatagaaggcacgatataagtatcttcttttaatgttattactgctactatcactactataatttatcagtattagtagaagtgctaaggtgcagtgacacaagccctcttagaaagctcatatgagcacaggaaggaaagaagagagaaagtaagaaggcaactttaacaaagaccaaagcactccttttccctccacactgaactacaggttaatgatgaggttatcatgacccggttggatcgcaagggctgttccagcagctgacatctgttctagaacctatccttttttctccttgtttgcctctgcttgtatggtcacctcaccccgcaccacattgctagctgtctctctttactctgactcagccagcaggcatctcaaaactcaacacagggaaatccacagccaagcatcacaactttatctcttgtcttttcttctcactctttgtggtacaacgttccttccaatgcagttgtgggtctctattaacacttctgtggctttctccccaccccatcaactctgtaaccaatcactacatatgcactgtaatttaggctggaatctgagctttgacttttaccaagaaattatgtatttctaaatattggcctttggttctactacttgggtctaaaggacatgttcacatatttcctgtctattcagatgactggtaacttgggtgattaaatgtttttcagattgttttattttacttaaactctaacctccttctctaatgcttgaattatttttttttcaagagattggccaatttgtgtttggttgtctagggaaaaaagtgtctgagagcgattagatgaagccaacttgctttcagaaaatgtaattttcttaagatactagagcatgatgacttcctttctttgacacaaatatgccttatctagacctactaatgagattaacctagaaaatggacgtgcaaaatggggagtttgttttaaactttgacatacaccagttgaaaaaaattctgagaaatttttaactaaaaaaaattcaagccaggtacagtggtgcatgcctgtaatcccagctactcagggggctgagaagtgatgatcacttgagaccagtattggaggccagcttgagcaacatagcaagagcctttctctaaaaaagacattcaagtggtaacagagagcaatttagtaaaaatcattacattcagaattttcaaatataaaaagaaaaaaagaaaatgctagctaagggaaaataaaagcagcttgcagtccacagtgactgccagtgtcaagcaggaacttcattggccttggacagggtgttctagatgtcacagtgtcaggcaatcaacagacggctgtctgataactgtaacttttgccacagtccctggtcacagcagctgatgtgaaggatgtatgatgaaagtgtgtacattattaggaatgcagaagttagaacagccaaatgctaaatggcaggtggacagacaaaaaaaaaaatgtgcttttattctgttccaaggtgcttaattttggttaatcctttgctttctactgatcacacacaaccttcttcaattctagacaccattgcatatgggcacttaacacttttaaatatactatgtattgtgtcttacttattttattttctgttccttatcccccactactgttgtgggaagtcagggaccccgaacggagggactggctgaagccatggcagaagaacataaatcatggacatttattagttccccaaattagtacttttataatttcttatgcctgtctttactgcaatctctgaatataaattgtgaagatttcatggacatttatcacttccccaatcaatactcttgtgatttcctatgcctgtctttactttaatctcttaatcccatcaactttgtaagctgaggaggatgtatgtcacctcgggaccctgtgatgattgcgttaactgcacaaattgtttaaacaatatgaaatctgggcaccttgaaaaaagaacaggataacagcgatgttcagggaaaaagagaaataaccattaggtctggctgcctgagagctgggcagaacagagccatatttctcttctttcaaaaacaaataggagaaatatcgctgaattctttttctcagcaaggaacagccctgagatatagaatgtgtggctaggggtaggtctctaaaatggcagctttgggaatgtctgtcttttacttttatagataagggattaaataagccctggtctcctgtagcactcccaggcttattaggacaaggacattcccgcctaataaattttggtcagaccggttgtctgctctcaaaccctgtctcctgataagatgttatcaatgacaatgcgtgcccgaaacttcattagtaattttaatttcgccccagtcctgtgatctcgccctgcctccatttgccttgtgatattttattaccttatgaagcatgtggtctctgtgacccacaccctattcgtacactccctccccttttgaaaatcactaataaaaacttgctggttttgaggcttggggggcatcacggaacctgccaacatgtgacatctcccctggacacccagctttaaaatttctctcttttgtactcttgccctttatttctcagaccagctgacagggaaaatagaaaaggacccatgttgaaatatcagggctgaatttcccccgatacactacaatgtaagctcagttagagcaggggagttccatctgttttgttcactcctatatctctcacccagaatagttagtgcctggcacatagtaggtgctcaataaatattggttgagcaagcatgtgatttccttgcagttccacaaacaaaacactactcaccttaacctccaacagaatacccagattccagacacaatgatctttcttagaatcatggatcttttgagcctaaagaaactaggaggttctacagtccaatcccttaattttactgataaagaggctgaagtccagagtttcagcggattgctccagcacataacaaatcaaacaaataaccaggaatagaaattgagacttctggcccactgctctttttccattaatttcagcataaacccattcccattgctgaaatagcagtggcctcatccatcataggagcataacccttgggagttctcttgggtgaagagctccatgacactgagcctgctctgggatcgttttggtggctcatatgttttcccagtcgaagacaatgaattccatgttgttgaaagctttcattctaccttcaagtcttcagacacgcagattctcctctccctccctccaccagattctagctcaagctctactcatcccatgaagttttgccccttgaatccagcccatattgatgtcatgttcctctgctttgctgtagttgtaataggatgataaatccaaaggcctgtagaggccaatttagtaaagtaaataaagaaaactgcccagggtgagaaatgaaatcccaggatcactagatccttccacttttaaagaagctatagtttcccagagttaagttcccaccgtcactgatctctttagctttttgctccttcctttcaggaattcaaaggaagaatgtggtctccaggggcattcccagccctaccatctcccctctgggtgccctccttcactgcagttcaccctgtaractttattcacatcaccaccaaggtgattccctgacaatgtgaacctcagtgagaggtgaacagagaggactccctgctcctcctctttcagacccaggagctgtctttagccccattctgaagaccacccttttcctgtatttccatccgggctttggtcaagtaagcattcctaaatcccttagagatgagggctcttctcctttctgggtctagggstacatcattttgccttcaggtttgaattsctgttccttcagcctcatttctcactgattgcactgttttccctggagatggctttgaggacatcctggaggagccgtgctggggtgtcagcctgccaccctcccctgggcagctgccctgcctgccttcttaacctcacgttggactttcctgttttctctccctttcattcatctttgccaagagatgattcttttaacaccctgactctggatcaaattgttttctatctcctgaagcttctcttcatttgagcttctcttcacttttgactttttttgctcatcgctatttgaaaacggagctatttctacttctttgaattctgaatgttcttctaagggatccaaataaccatcaacatgtaagaaaagckgtctckgtctttctctgagttcttctctaatcactgagagaactataggatatacacagtcatctttgaaaaacccatctcttgggtagtctyttgacctcccagtccctttgtaggaacatctctgctgaagcctgtccctagcatagacaggctgttcttgctttagagcctgaaatgtgtgcgtctcttttccttgactcagaagaaatgaatttaagagatacatattgttttaatcaaaaactttttttcatttaaccagtaatacagatagtttcaagctatcatcctttctcttcttccctgggacaaacatcacttattccagtaagcaggaaagatattttatggcttcaatgacgcacattttatcaagctgtcaactaaactttgtgaattatttgtatggagtattttggtgttgatgtctgggggcaaggtcaggtcaggattgctaaagacgagactaggagacttcatcaaccagattgtgaagattcttgaataccatataaaagggtctggaattttacctagagagaacacatacatttaggtaagagtgctaggttttagaataaaataatgtgatggcaggaaggaagatgatttttaaagatagaaactaggattaggaagacaagccatggtcatggatacagaaaatagtgacagatttgagggaaagaattggcaggatttgaggtaggtgaggaaaagggagggattctatttggtgggggggatttcagatataaagagaaagatggatgatttgagagcaggatggttgctctaaaggtaaactttcagatggttctaaagtcatctctgcagtaggctatttcttcagaggtctagtggacttctcacagaccaccaggagaacaaatgaaaagtcttggtggctgaggccacctcctttccccactttgtaaaacaggaggaatataagggtgccttcatgggataactgttcacaaagctatctgaactctggttagaaacacaaagaaattataaatgtttgagttgattgatatgctaattaccctgatttgataactatacattatacatatcaaaacatcactatgtactccatatatatctgcaattttatgtgtcaattaaaattttttaaaaatctgttaattagagtctattggaaatttcactactggcattaaaaatcagagcctgtgctgctgaaatttatattctccactggtaacctaggaattgaagtgctgttcaagttttcaaaaacaagcatgaagcattaagaaaaatgcaattgtcaacagaaggaagtaaaatagaaagtagatacaactccctatgatcagcctgaggtagagtcagaccctggccaaacccacagcaaacttcataaatttaaaaataattttctaagtgcttacaaatccattgtattatgatctttttttaaaaaggaaaagtcattttatccccctgttatctaatgctatctatcatctaatagatactcttgaggaaaaacatctgttaatacccctgagcattcttcattgtaccctaaacacatgagaattccctttcgtaagtaattgaccttcattatcattgtgacattattcttattctgggaaccaagctctctgattgggagtcccaccctgggttaaccttagtccctatggttccttcctttagccaagtttttgtttgttttgttttgttttgcttccaggactctccaccatcccattcatgtacccctcccgatagggggttagtggccacacctggcctgcaaacctgaagatttaagatgcacagtgtcgctatttgaccttcatttttggaggctataggattttagagtgatagcttttctctttcaacactctaaagctgttctatttttcttttctggtttgcattgtttctgatgaggtctgcagtttcccttatttgtttcatagtattatttattattgtaaagtttcttctttcctctggctgtttgtaagattttattttatcttctctttctagtaattttattatgatgtatatttatgtggttactattctggggagtttgccaagattcttagatctgttaggttacagttttcaaaaagtgtcaaacaatttgtccattggttcttcaattttttttctccttctaccttgttttggacttcagtaatatatatgttagactaattattattgtcctatgggtcgctggctctctatttctttattttttttcagtctttttaaatatctattcctcagtttgtataacttctattgctctatctttaaatttactaattttctcttttacagtatctaatcagctgataattctgtctagcatgctgataattctatccatggaattttttttattttcataatttttagctgtaaaagttctgttttattctttttcaatcttctatttttctcattagtttcatggttattcytctaaatctatcaacatatttatgaaagcaattgtaaagtctactaaattgatcatgtctgttatttctggatctatttctgccatgaatatttctccaggttatactgaacatttttctttacatacctcaacatttttgtttggatgttgaatattaaattatcaggtctagattttgttgtcttctccttaaagaacattgaacaattttgttttggcagatacttaagtaatttgcaaatcaacttgatcctttcaagtctacttttaaaattttgttaggtcagatctaragtarcctttaccttagagttggttcagctctaatactaagatatgattcttctggagtctctcctgaatatctgagtttctaatgcattgtctctaagaactttaatgtctcccaaccctgtgtaagctctaggaatttgtcagattaaaactcaccagtagttttggcatactatgtatgacagtttcacccacacatgtccagtgtactacgggcatcaggtcaagtggacttagatgcagagttctgaagttctacttctgtatacgtktctctcctcaggtactctgtcatctgaattccaacctcctttgcctcctctaatttcagcatctgtattttaagtkaagggagaacttcctgctttacttgaatttctttccttgtcccatgatctggacatgcttctaggtagaaatccagaaccaatgcagggctcactgcatttaccttttctcatggatcacagtcctgaacttcattttatcaaagatctaaaaacagctatttcatattgttttttaatattttatttatgatgcaaaggcaagtccagtagaagttactctgatatggccagaagtggaaatcttatctgcataatgtattaaaattcaagatttacataaaaatccatatatatatatatatatatatatatatatatatatataatctctttttgaaaagtagaaagatctaaacagttctacctttcatgaaatttattgactgaagttgatttgcaagtgtccacttcttggttgaatatgcatgcccaagttttctcatttccaccaagataatgtcactcattttgcctgctgcttttattctataactacaaccacaaatttattctataaagtaatactagtcagtatttttgatcaaatgatgacaatctttccaatgcaggtaaaaaagcaaaactttaaaatgatagcattttatacaatattccaaaacatataccatcaagcgttacaggaatgtgcaagatattatggtggcacaaagatggcaatgaaacacattttgaattgaataacaatttttaagtattttgagatggcaatattgaagaggaagctatctagctacttgtttacctgtaagataaatatggtgaaaagaaattgttggaagatgcttactaatgcacagttgttggcatattgttcccaaaatggcatcgatgatgatcattaatcatgactagtttggcggttttcatccaaatcctgtcctatactctttactaaatctggatgtcctgttttggcagccccattagccttccagatccttagacttaaacctgcagtcaactgggttttctctttcttcttgatccttcctatccagtaaattgagattactgacttgaggctggatgctgtggttcacgcctgtaatcccagaactttggtaggctgaggcgggcagatcaattgaggtcaggagttggagaccagccagaccaacatggtgaaaccctgtttttactaaaaatacaaaaattagctgggtgtggtcgtgggtgcctgtaatcccagctactcgggaggctgaggctggagaattacttgaacccaacaggaagaggttgcagtgagccgaaatcacaccactgtactccagcctgggtgacagaggtagaatccatctcaaaaaaaaaaaaaaaaaaaaattactgacttgaccttgaccttcatagtttctctcctatctcttcctactctttgtattaccgatgtctatctttgctcagtccctgcttccccagctagtttccacaataaatattgccaaatattaatcttcctaatataaactggtgtcatattacttccctggttacaaaccttctgtgtttcctcatggtttataaaatgaactaaaaacttcctattctttcaaggtctaccacaatttacccacagacttgctctcatcttatttcttactattctcatttatgtatattacctctaagatatcaagaaatgttaattagagctgaaataaatatgtatcctaaagaggcctcgaatctttcaaattcctccttactttgtccatgccattgcctctgtttgatgtgtttataccagtattttatgggtccaaactctactgttactcaaaattcagctcagttactaacccgtatatatcttccccatttcccccattttaaagcttttcttttgactatgggacaactttagcaatttatctgtttgtattgagttgcaacttatcacttattaccttgtattattgttatttgcatacacatatattcttacatgtcttgataatggattatttccctgaaggcaggattcatgttcattattctgtcctttacatccccttgcatggtaccttgttggtccttgataaatattaagaggatgaatacttctctgagttctgtgatgcagtcttctaacactatcactttcattgcaagtaaatatgttggttaccagaataatcatatacatttagtattttttccttccgtttactttttaatattcacatatattcacgtttattatggtaatatcgaactctgacattgtcctcagtacaattttgtgttttataaggggcctgatttgaaaaaaagaaggaagagaaaccaaagatctgaaacccacaggctcttttcttaatcatgaatcttggcagtgagagttgcaatatgttgccacctattaattaaatctgtactctggtgaattggccaagagagagaacattaaaaaaaaaaagaaagaaaataactaagaaggatgaggagcataataagtctaggaaaccacttgagtaatcagaaactttcatgtagaaataccccggccatacctttttcctaggggctgtgagaaaactgcagggaagtctgaaggccaagaaagaacctaaaattttggctggtgagtcaccactaaaatattacatagcctcaaaacatgttaataaataacactgaaccaaaagtaagagccaattatgagcttaatcagaaacagagagtaagatatggatgaaattttagagaccatctagatttcagaacattgctaatcattactgaaaaacagatctcttggaacatctgttgacagctatgaaccctgcctttaggaaaatgcacataaaaacaaaattagtcttaggttgagatcttttgattcagagcacatttcatcattaaaggcatgaaaaacacatttcgggaagagctggcaatcagctcaagatcacataggaagttagtgacagggaggtagtgtctgaaaagtgcctacagaactcaagctcctgtcttgggattcatccaacacattttctctcatgtgtagtagcattccatgcataaagtaatcgattttatttgagtaaaacttgcttagttttttgctttctagaagggaaaccaaaataaaaatgtaatgtcttttgtgctaggcactatactgggtccttccacatgtaccattttactactcccacagccatagataatattcttatttcacaacgaggaaatgaatattaagagagattaaggtgactttcccaaatcaatacagatactataaaatagggtttagatatgaagccatagctctacctcagttttggtgatttcttttttctatgcctccttacctttcactctgctatgctgattctctgggaaggctttttttgatctggcaaatgaaataaggcttactgatactactacaacaaaaatgattgcacacatttaaagacataagaactttatatagaaaagccaccaacagaactgtttgggaatgtctgtataccttctctggcacaatttttccagttattatttgagctaagtgtacccatttctttcctccctgtttaaaatattatccagcactgaccacacagctggtagaactgttttggagaaccacccattaatatgtaccaaaagccttaaaattttgcctgcattctgtcctgggaattctacttctattaatttatcctaaggaaatcattgaccaacaaatagccaacaaatgtatgaacatgaatgtctaaaatagtttattatgacttaaaaattataatatgaaacaaactagggatctagaaatagaaaagtatggcatattcatacaacgttaaatatgcagccattagaagtgatgttgtagatatatgtttattgaaatgtaaatattctcatggtgtaatttcatagctaagggttgtattgtacctgaattattgtttttaaactctattacatgaccatgtattattgacctattattgatacatatatacattgtttccattttttaatgtactataatgatcttcatgtgggatctaggcagtgactctaccttgttcacttcttttccaaatacctttccttctaaagaaaggggtctctatgcctttactttcgtcttatgggaacttccctatgtggcaatttacattctatccacactactgataatggtaaaaccttatcatctaggttagtcagatttagcacttgaaatacaaaagagagattatgaaacttagaaacttttttccccactcaccaaaccttggcttccaagacaatttctttgctgtggaatcaaaaattctatttttgaagtagaaatctgaatattggctctttctctttgagcttctgctttaaaatcttaatttgtccccagatcaatggaggcctccacatgaataggttacaaagatatgggaaaagataaaagtatatttattcatattttagcacaccaacatggtgcatgtatacatatgtaacaaacctgcacattgtgcacatgtaccctagaacttaaagtataataaaaaaaattaaccccattaatcattaactttattgtttaatttgaaagggagaaggatctttataatgagcttttctatacaagcacatgctgtatcttttaaattagttaggtcttcttatatatcctaaaatatgttataattttcttcacaaacatacatttattatcacatttatttctaagcagcacagagtggtggttgctgttgtgtgatcttttccttctccattttattttcaaattattgacagtgttttggaaaataacttattttttaagttcatcttgtacatagctgccttgttgaaatcttttatttattatttttgtttgtttgtttttgaaacaaaacaaacagagtctctttctgttgcccaggttggaatgcagtggagggatcatggctcactgcacccatgaccttctgggctcgggtgatcctcccacctcagcctcccaagtagctgggaatacaggtgcacaccaccacatccagctaattttttgcattttttatagagaagagatttcaccatgttgcccagtctggtctagaactcctgggctccagtgttccaccagcttcagcctcccaaaatattgggattacaggtgggagccaccactcctggcagaaatatttaatcttttccaatctttttcttagacattgtgagagattcttcttttgtatgccctagatagacaatagagacaatctaatctctttctttttaataggggtttcactaatttctcattgtgtgttttacattagttagaaccttagggaaaataagaaagtgttgaagtgtagctgtgatataggataactagatcacttttttaagcttaaaaaaacccctttactataaatggctaatagtttacaattaggtgtcatgtttctgttagttatccatccaggctatgggattttctttccgttccaagtgacaaagtattttaattttaaaaagaatcagaaatgggtggtatctatcattaagataatcatgttttttctcccttagcttttggtttattgaattacatggatggatttcccaatgttcaaaccttcttatattcctcagtaaatcctaattggtcacagtatattattagatttaacttgtgaatactttggtattttgtatcatagcgtttgctagcaagactggcctatagttgggatgatgtccatcaatttctatgctttggaatagttgatgtaacataagaattacattctcctggatattttggtacactataatgccaagggagaaaagcaatttattgaccattatgtataatatgatccattcttgaaaatacaaatacacatatgacaaaatctgaaggaacatatcaaaggttaataatatttctgagaagcttcattattgttgttttttcttgctttttctcaactataatttttagtatgtctatagtggatgcagacattctgggggaaatataggagggtcaaatgttatatggggtaaaaatataaaaagcatggtagttagaagccactgattctgggaatatgctctgagctctccaagcaagagcatcttgcactaaagatttctgtgccaaactttgtgctccagataacagatccccgtttccagaacctgcacccaatatctgtactcacctccaaattttgacctggctcctgctagtctgacccttttgtagaccttctgataccagtctctttatagatactgcatttttttctgacgtttgggcatcttttggctatggcagtgccccctgtacccactgtcctctcatggcttcattcatgtggtcataactcatctcactgcctctcagttgggagctgacacttgatttggtaaaggaaacagtgtgagagtgtctgggtctcctttctttagccttatatcaagctctttctcagatatatactttgcttcatctgaattaaaaaaaaaacccatgaggaatcatggctactaactgaaatttacttttattttttgacttgaaagcaaaacagtgattttccccagtgagtctatcgatacgggataaagtactgtagcttcagagttcttatttggtctttccaaagttttatactttagagttaggattctcagtagattttccagtcatttagaaataacccagggcagcaaatatgatctgctttaataggatgaacgagtttaggctacagcacattgcagcttggggaatcctgctcaccttatctatccctctctttatggtctgcggataccgcatggtgagtattctcagaattgccaagtctgcaaacatactgccacttaaagcagtctccttggtcagaaaggtgctttctcccatatgttctcagaggactgatagaggtgtccccctggagttatgaaaataaagtcttcccttctttctagtcatttgacataaggcaattttagtctctgtgtctcatgtttaagggccttcctctgaaatctgaaaaactcgttttaaattgttagggtgttgcagtttcttaccatatttcaggcaaagttcttcccactcgggtcatcagcctcacctttgtgggattccaaattgagtggcaatacagtgtagcagttaagaaaatggactctagaatggattgcctgggttcaaaatggccaccacaactttaattgtgtttacttgaccaaattaatttttcttttttcacccttctttctcaatctgtaaaattggggaaaataatagcacctactttattatgttgttgggaaatgtaaatgagaaaattttttaaaagttctaagcaagagtgtctggcatatggcaatttgtcagtaagtgctatctcttcttattttcatcaagtgaaggtgtacccaaggcaatgttcagaaacattggctcctggcacaggagtcatgccccaacctcattgctctcattgtgcaaacacaccttccctgtccattgcagaattccatacctgctccacaggctcacagttttgctctccatagcatcagctgagaatctgaaaacaaaacatcctgttctcatagtttttcaacctcttcatcttcggtgaccttctctttcgctcatgccttgccatctgcactcataaccacactgattatcactagaaactgtatcatcttttaatttgttaattgatgctcacttcctaacacaacatccgcccttcctcttaactttctaaaatgtcctcacctccacaggacttggacctcatccaatactgcctaatgccctctccctatcattttcagtcgctgagttccttctgttcttctcctgtctccgtattcagctagattttgtgatattccattatgttcctgctcttgtccagctcatcttccattgtacctccttccaaaaatgccagctgtttgataaatctaacctccagtactcagtgctcaggacaccttaatgaaaataagggggaaaaaagctgagataaataggtagaacaagagaaaagaaaaatctctgcctaagagggaaggtattccagatgatcttgttatgggattttcatatatatatacattttagcaatctaacatgacagccttaaattgctgactcatagcattacttagaaatgaatttgaaccttggaaaactgcagagttcagtttgtaattttccaaacctcttgatctcaaattcaaaatgtaaattttataagattagacttcaaaagacttcactgtaatatagtacttaacaattattgggaggtggaaggggctgtatcatgtcttccataatcacatatttggtccttttcaaatattccaaaaagccatttgaaaatgtagtgtgtgtgtgtgtgtgtgtgtgtgtgtgtgtgtgtgtgtgtgtgtgtagtttgtattagggaagaagttagaatacaccttatgaggaaaaaagaaacaaaaaacacaaacaaatttagagaaacaaatcatattgattgttcattatgtgccgtgtctaatagtctcactatattttaaaaagaactagttccagcttaaaaaaaaaaataagggaataaggctcaagttccttttctctccatacaagcttgttttctaaactcaactcacatatttttttaaaagacacttttcacacactggataaatgcctcactctgcactgagtggtgaaatgagggcaggtcagggggagagctatgtctggcaatccacctgcctctgttaagaacttttattatccatgaaatttatctttggcactttcttttctaaataaattttccatctctgcttgcatcagaaatgaaaagactgaaaccacgttctttgccagctttttactttttatgaaaacagttagtaccttttacaagagaatttaatttgcaatggtgtcttcactgcaagtagagagaatgaaggaagataaaggaagacaaaggagaagaaatgaggatcaagagggaacagatggcaaaatagcatctacagtgtgcccagcatcctgctcagagctttagcaggtgtcagcaaactatcgcaaggacaaaaaaccaaacaccgcatgttctcactcataggtgggaactgaacaatgagaacacatggacacaggaaggggaacatcatacactggggactgttgtgggatggggggagaggggagggatagtattaggagatatacctaatgctaaatgacgagttaatgggtgcagcacaccaacatggcacatgtatacatatgtaactaacctgcacgtcgtgcacatgtgccctaaaacttaaagtataataataataaaataaaaaataaaaataaaaataaaatagaaagtaagatgcggccaggcacggtggctcacgcctgtaatcccagcacttcgggaggctgaggtgggtggatcacctgaggtcagcagttcaagaccagcctggccaacatggttgaaaccccatctctactaaaaatacaaaaataagctgggcattttggcgtgcacctgtaatccaagctatgcaggaggctgaggcaggagcattgcttgaacctgggaggcggagattgcagtgagccaagatggtgtcattaaaatccagcctggatggcagagcaaaacttcatctcaaaataaaaaaaaaaaaaaagaagtaagatgctcccccccctcaaagaagacatatggctatcacatgcaggttggcatgaaagtcaacacctccgataattcttcttttctttactgtgaaaccaccctgccccagtctcctgcatatttggtcattcaagtgcacaaataggaaaatagaacgttagagagggaaaagatcttagagcttcccctgctcctaactttatgttatatacagataaagaaactgaggctcagggatgggacacttcgaggacacagagttgttgacattgctgatttgaactaaagccttggacttctctccaaactttctgatggagcatgaaagcaagaaattacggagtaaaaattattctttctaagaaaatatatatatttgattcttctaatagatcagggccagtaaactacagcctctggaccacatctggcctgctgtttttgatagtttgttagatcacggtcacactcatagagttttgtattgacaatggctgctttcatgctacaacataattacaatgtaattacaatgtaatgatgacagcctgtatacctgcaaaggttaaaatatttgctacttgtccctttgtagaaaaaatgtttgctgacccttaacctagcttaatactttgtgaggccagggaatatcactgctttgtccaccactgtatccctagcatctagcttgatgggtcttcaaaactttgtttaataagaaattgataaattaggtcaactcaaatatccaagtgaaaatttgtagagttggataaacaatggagaactttaaagtgatctgagtgaacagataagttttagaggctttgaagattttgcagtttgaattaatttctgcccaagtgccatgtttgtgcagagtaaaggtaagaatagtacctcctgtctaacttaattctccactgtccttttttactgtcttaggtgttgcttgccaaatattcaaatttttcccatttggggctgggccatgtggctagttttagtggatgagtttaagtggaagttgagatatgtcgttttcaagcagcgcagttctttggtaagaccctccagagttctgtgttttagtcacagttaccaaaaatgctcccaatagtgaccgatctatcaacctgggcccctgatgcagaaatgggcaggcagaatggaggtcgcacctgaatctcaatgacatgtagtataagccacagataatattcctgctatatttatttgtatgctaatttttcaagaaagcaaatgtcacctccccacctaaatacaaatcccttgacaccatccaaaaccatgcttatcactcaccgaattcctcaaaacacctcttaacttgatttgaatggatcacagtcctgatacattatttattcagtctttcaataagtctttaatgatgcctactgtgtgtatggaagagattgactagttgttaatcaaacctttttccttttcctcctggacatacagtcagaccacatttcccagtctctcctatagctacatgtaatcttgtgactgacttccagccagtgaaatgtgggtagagtaattctgaatgagttctctcctggcatgtaaaaatatcctgccttgactcccactttctttctttccttatttattgattgccttgtgatgatagcagagcctccatcaggctaagtttttgaaggactgtgtggagtagaatttccagtcctttcacatccacctaccatttggactttacttgaatgaggaataaagcttttattgtggtatgccattgagagttaaggttttaactttacagctgctagcattaccttaactaagaaagcaatctgggagtgagggattacaacttttaacatatggtcaggaagttctcattaagaaggtgacactggagcaaacttgtaagagcagagggagaagctgtgtaaacatgtggagaaagaatggtctaggcagagggaacggtgtgtgcaaagtccctgaggcaaaagcacgcctggcatggtcaaggatggcagtcagctcagtgtgatttaaacaaaggatggtggatgaagtaaatgagagcagaaagatgttgccagattttacagggcttgacaactttataatacaattctagccactgaaactaggcttgtagtttatatgcccaaagggcattttttattttttatttttatttttttgagatggagtctcactttgtcacccaggctggtgtgcagtggcatgatctcagctcactgcaacctctgcctcccaggttcaaatgattctcctgtctcagcctcctgagtagccgggattacaggcatgtaccaccatacccagctaatttttgtatttttagtagagatggggtttcaccatgttggccaggctggtcttgaactcctgacctcagtgatctacccgcctcggccttccaaagatctgggattataggcgtgaaccaccgctccaggccccattgtgctctttttcaagcccatgctgaatcatatgactgcatctgagtatcttatactaaatgataaaataaatgatagtataaatgaactctccttgttataatattatgggcacacttttaggcttcatactccattttaactttcctttgcaagtatagcaaaattctgtgctcatatagattcagagaaaggagttaatacaacttaactatttcctatgaatcaggatataggcacaactaaatcatgacttttcctacaagaagggagaaaaacttaaaatcactccatacctcatacagactcataggatgttagtgattgctgtcagtgcaatgggaggtcaatatgagattttccaaatatttcattccactctggaatttgtcttaacaattgtcttttcaggtgagcttaaggtgaaaaaagataactgaatgcctgttcttctattccctaaatataattaagtcaagaggcttactggacacggccattagtattagttttctgtcatcttaatatctaaatagcataaaattaagtagtttactatagttacaaaatgaccagtagtagaaaaatgaatgagcaaatgctgcaaatagaaaatttataaaaggagaaagtaaaatgcctagtatgtaactgaaaaatatctaattggcacagtaataaaaacttcagggatgtacaccattttaaaaagtatcaatttggtaaatttaaataaatcataatgacccttttagacaaacataggaaaattgctctctcgtacaatagtggtataacaatgtaaactaaaaaaaagagagaacaatttggaaatatatactgaaattcttaaaagtatacatgattcctagctctgcccactgagaaggcctagaattaatacaactctagtggcaatgagcacaactagtgcctagatcttggttagtcaataccattcaccagtcaaagaaaccaaggctccttgaagaaatggtttattttggggctgagcagaaaaaacacaaagtaagaaacctgaagcaccccacagtgccagaaagttagaaaagagaaacaaagaatgtaggaccccaaactgaaagagttggccaaaggcagaaaacatgagaaacaaataaataaagactgtattggattgtaagtcaaagaatcaataaatgttttggatccatactaatgaccagtcaagcaagtaaccaatcatttaatggagaagaggaaatctcttacatgagaattccaagcaatgtatgcggtggacttagtgacttggttccaaagaataaagtatggaaatagaaaaattgtagctgtggaaaaatttagcagacaccactttaaccaagtggtaaagatgaagattaccagtaataagtcgtgatgacatcaggtgctctcttatatgatgcaatgagaagattaccacaactctcttccctcaaatactaataatcctagtctaataatgacaaaacatcagataaaccccaaatgaggatgttcagctaaatacctgataagttctcttcaaaaacgtcaaggtcttgtaacataaggaaagcctaagttgtcacagactttaggcgacaaaggagacatgaggactaatggaatataggatcctggattggatcctggaagatggaaggtcaatgtatggaaaaactggtgaaatcttcataaagtctatagtttagaaaaaaacattttgatcaagcagtattactcctaggtaattatcctgtggaaactcttatgatgtatgatatcagttctcaaactttagcatataacaaaatcacctgcagggactgctataatcaaatttctgggctccggtcccaaaattgttatccaatatatctgcagggagcaagggccggaaaatttgcatttctaaccagttttcaggtgctgctgctcaactgatctgggaatctcactttgataaaccctgacatatgtaaacatttgctataagaatatttactgtcataattatgtattggattacataatttttcttctcttctcttctcttcttttctttttttgagacagggtctcactctatcgcccaagctagagtccagtggtacaatctaggctcactgcaacctccgcctcctgggttcaagtgatactcctgcctcaacctctcgagtagctgggattacaggcacctgctaccacacccagctaatgtttgtatttttggtagagatggggttttgccatatagctcaggctggtgtggaactcctggtcacaagtaatttgcccacctcaacctcccaaagtgcggggattacaagcgtgagccaccgtgtccggccatttactatctttttcttattaatgttttcaaacatttaaaaatattttcaaatgcttctataatatttgtactgcttttgcagtaagataaaaatattagtttaagttaaaaaggcaaccctttcggacatgatgttcttaatatttagatgagatttttgtgtttccgaaggatggctgatgcacagggaattcttttagtggctgctttttaaaactaatgttcaattcattaaagtgacaaattaaaaaccctagttttcccttaagcttttaagtttaacctaaaaataacattatcacagttataagtctactgatacttaacagtcatttccaagataactaattaatattttgacactcttctgaatattctgtcccatttacaaacatagctaaactgccttaaaataatttaaacttcatttataaatttaatataatagattctattactatatattttaaatatctgttcaacaagcaaaactttcccagatcctttgacattgcaagttaatgtattaaattatactttaaaaacataatataatctcaagttctttaaaatagcctaacattatttataaacagtcaaaatctcatacatttcaacttaaaattccaagtctaaactgaatgactcaactacatgttttatgtttcctcataaagctaatcttttagaattttaaaatgccaaattcttttaaatgtgacaatcatttgaaatgctggaaacccagattattcctaaacctaacataaatgatcagttcgatggctctgatttagttttttgtatatgtgctgttgtgggctgtcttgtatgtccagcctcaaccctcaaattcatatgttgacatccaaaccctcactatctcagtatatgaccttatctggagatgaggtctttacagaccttaagattaagttaaaatgagggaacagagagtgataccataagaaggtgggaagaatgcactttgaagaccatgttggccatttcacaagttggggagagcaggtgagctgagagctgataactgaaaggaagtcagtatgaagcagcaaaaagaacttagctcctcattgggaggagtaaaatgtgttaatagacaaacaccctagtgaagttaatgtattcatccattccacatgtaaaacacactcatttggaataagtgacgttatctagcagagtccactgttagcatattcataatccctgagtaactgagaaagacagtttttctgagcccctgtattggtttcttttttttttttgttttgcttccccactcccctaaagatcctgcctggaattgcctctcaaactacatgcactcaagtccttggtttgatattccaatctatgacagtaatgcacatttataaaattgtatctggagagagaaagctaatctggatattttgggggatggtggtaagggagcaatctcctattgttgtagtataaaaaaacagtgaatttggagtcggaaaacttgtattggaatcttaattctatcatgtattagatcagtgcacttgggaaatggacctctttgaatccccaaatcctagtttataaaatgaaggtaataaatgattatcaaatgaggtaatctatgccaaagtgtccagcacatagtaggtactcaggaaataggaatttcctttcttattgtttatatatttgtgttattgaaacatagttgaaaagataatgtgatgttgtagagagaaaaggttctatatcaaacaaacttacttttaacttcagtcctggcttcagaccatgatcctgggtccagtattcaatagaagaaatagtagctttcccctcttccagaactaagattattagaggcctttgtattaaagagatagagagattttactctaacagatgtccaaatgtgtatgatgtaatctgaattgtaatgtggaattaaaatatggcataccatgatcccatccatcaattcaaacacccttcttcaatttgatgttaaaagctttattactttatgattgtggaaaatttgtagacaatgtattagaacaaaaatccattgcaatgtgttagcacaaatctgaattttaggctcaataggccagtcttttgatagatttatcaagtgacttgtatctgaatggttaatcaggtgtattgataatgctggacaactcagagccatattgtatatgcaatattcacacacatatacacacacactagggtatttatttaacatgtatatgattgttagtttatgtcagtcactttagttccaagaatcaaagaacttggccctattagccagaacttaattgtcttggtcacttatccctgctgaagacagaatgattattaatcctgaattttataagggtccattcactgatattggcaatgtgttcctaattttaaaaatcattgattttactctattcaagcaaatgttaatttggatgtagaacttgaaggcttaactttgtcacactgatcattgggctttgcagggattaaaaactaaatgtgaaaattctctcagtgaagttgtgttgaattcaattttgagctattacctgtacatggaaaacatgaataatgaaataatagtaggtattttaaaaagaacacatattttatggcattatcctaaatactttatgcacaacataccaatatattctcataacctgcatatagagtaaggccatcccattttcagtgagaaaacagaggttacgggaagagaaattattatccatggccttgtgctaatagatgttagaatggggctttggaacagataccattgacttcaaaatttttgtactcactagtaccctataatgattcatgatcaaacaaaattttacctaaaattccaagagtctcacaacagccttccaatcttgtgcctgggcccaaggactctgggccaagaatctttttactagttgctgccactcatgcatgccccagcttctcggcttctccagagtttaatcccttcattaaaaaccaccattgttctcttttgttgacaaatttgagatgtcctttttgattttgacatgaagggaccctggataaggcctcatctcctttctagctccattcccttatgggctttgtctccacttcagaactacatgacttccaattcagtcaaacagagcttcttgctattctccctgtaccagcttctgagggctgcggtaacaaaggcccacagactgggcggcttaaacagcagaaatgtattgcctcacagttctggaggcggaagcctgaaatcaacatgacagccgggctggttcctcctgagggccatcagggaggaatctgttccaggtctctccttcaacttctagtgctttgctggcaatctttggtgttccttggttcctgctgcaccctacccccaatctctgcactcattttcacatggtattctccttccatgcttgtttttgttgaaatttccctgttttataaggacaccattcatactggattaggggctcaccttattccagtatgacttcatccggtcatcctaattacaccgtcaatgaccctatttcatttttttttttctttctttttttttttttgagacagagtctcgctctgttgcccaggctggagtatagtgtcgtgattttggctcaatgcaacctctgcctcctgggttcaagtgattatcctgcctcagcctctgagtagttgggattacaggcacctgccaccacccctggataatttttgtattttcaatagaaatggggtttgattatgttggccaggctggtcttgaattcctgacctcaagtgatcctcccacctcggcctcccaaagtggtgggattacaggcgtgagccagtgcacccagccccaatgaccctatttctaactaaggtcacattccatggcactggggctagagcctcaacatatgactttcaggcaaacacaattcaaactataacacctcctggtacaccaaacagttctgtgttttcagccccagaggaggctcttttaggctgttctttccctactactttagagtgaatttctagtcaacatttaaggctgtccccaaagtaaatgtttttgcgaagaaatctctaactcttgcaggttgttggttaccatttccaaacctgaaggaagctctttttgatttgatagccctccttacacgtgagggtataagttgtcatttcttttgaaacagtaagcccttcaagggcggtatccaggtctttttcacttctgtctctttagtgctatcacggtgtctggcacacagtgagtgaccagtaaaagttgtggagtgagtaaaccaaacattctccttactatattagggtccttctaactttctggtaaaggacaagtaaggggtggtcttcttgagactattaatcttacaaaatatgagacttcatgtttaaggatatgggtattgaaaacttttgcttggctaaataaaataaaagagctaagaggaaatttctggtgaaattgtctgatggcatttctcatgtccaatgtctaaaatttgccaagcttcagcttcatgcagtctctcccacttcctggctggtgtttagccattccagaggtcgaccagatgcttgcacagctgtcttgtgtgctcttgacactttccaaagttaggctacacatcaggaatgagaagctatgaactttcctggtaatttttccagggccggccatctcaaaatgtgtcttgcttgttggtatccacaggctcaaaccagttggaatttgaaggcaaatcccagctaactacttcattcgaggtggaaactgtaatgataaatgcgtgactccattaagcagagtctctgtggtggaaacacagtgatgaatgcaattctgagttctatcagtcctactgggatacaagttgtttagtagtcacaaatggcttagccataatgcagtcagcattcccaaagtaaagcatttccattcctgttactacaaaggataaattagctcctacaagggagggaatagaaatagctcctcaaacactgtctttaagaagttgcttaaaaccctcaccatgactgtctccatcacagacagctgtgttatttgttgattttaatactgatgatttgcattcacgtaataaggactcagaattactttacaaatagtctcattacaccttgcactgctgttgcaaagtaagtacatggttaattgtattttgttcatttttctaggcaggatcaggagccattgagtttaatttacctagagcatacactgatttaataatacacaagattgagaaaacaactgcaaagtaatgtggtttattttcttaacagacattctagaaattcaatatcacaatctagaatataaatgaaatgtccttatttaaatgttgctgacattgccagaatttagctttgggtagccttagtggtaaaagtacatgatttgtcctttggcattttagaaatggtcagacgacatccagaaccaagtctggtgaatacagtgtgtggccccactgcctgacagagattggtgatcagaaataaaacactgatttctattcaggtataccttctaatgtagctgttctgtaaattttcacattgcctgaaatgttttcaaatacagcagcattactggaaaaagtatatacagcctctcaagagatgtgtatgataagtcagcatttgaatatataggtttgggtatattttctcttaatagccccttggccaggcacagtggctcacacctttaatctcagcactttgggaggtcgaagtgggaggatcacttgaggtcaggaattcaagaccagccgggccaacatggtgaaaccccatcactactaaaaatacaaaaattagccatgtgtgggggcacgcacctgtaatcccagctactcgggaggctgggcaggagaatcacttgaacccaggaggcagaggttgcagtgagccaagatcacacaactacactccgcctgggtgatagagcaggactccatctgaaaaaaaaaataaaataaaaataaaaataaataaataaataaataacatagcccctcaaccccactcccacctcaattgccctaccaccatcaatgattgggtttcaattcttcctgtacccataaaaagggtttttgagtttgtatacccattttagagttccatgcgtgtgagaacacattacacctcctgtccaacttaaatattggcttcttacattacactccagttttggtatctgttgtagactcagaccctgactaaggaatggatcagcccagaagatgtctaggatgctaatctttgtggagcgccaaacgttacaagtgtgaccaaatctttctgaaaaggaaaggagactgagaaaattgtaactgctcaaattcctcttcttactctactaataaaagccaatgcttatatgtagtccagtctgtagcaggcattgttagaagtgaataaactttattaacttctttaaatctcacaacttaatgatgtagatatgattattattctcattttacagatgaggaaactgaggcagagagaggttaaaaagtagcacggctaggaagtgccatatctcatatgatgaatactaaagttactatggaaaatacttcaaaaatctctttaagaaatgcccgaaaccactgccccaccaggttatatttgagaattgtaacatgttcatttcatttagctcctcactaaggaggataagcccagagggcagctggggtttttgcttggctgaaggtatgtacattctgtggccagaactgattgttcagggcaaggaaaagagtaagcccagctgcctgctgccaggcccttctctgtccttcccccaggcagctctcaatttcttctccaagtcaatgtgaacaaatgacccaagtatgcacgctggaaagggtagcagtgtattagtctgcttggggtgttaaattattagcctgcatgaaaagcctatatatctttgtcagaagctgctcaggttgaatgtattttcatgaaaataggccctgaaataattcaaaaaaggaaaggagaggtaaaacagcagaaagttcagagcacaagtgatacaggcactagcattacgtcctgatgataggatgggacttgtctctctaagccacgagaactcccactaaaagactgtggaatgggctttgttggcttgtttttgtcctgtgggagagaagctcggctgtggttgtactgccttatgacactggggtgtttgctgaattggtggaacctttttcctcctcaggaaaatctaagttcttcacatcaagattctcaaagaattttacatacatgcagctgaactaggccatcattaggccagaaacataaaaatggagttttatgttaggaagagattgccatgcctgcattaaggaacttgactcaggccaacaaaaatatgctacataaaaagtttatcagcagtctgggcacagtggctcatgcttgttatcccagcactttgggaagctgaaatgggcggaatgcttgaggtcaccaaatttttatggatgcaccataaaaaatgtgtcataattacattatcttcccttcctaatatccacactatccccgtggacccactctgccagcaactactgtttcttcaaatttgtcttgctttttgcataaagaactgttttcttaaagtcctgtttctgtttaagaaactctcatgaatccagatgacgccgaaatataaaccccaatggtatgtatttccaagcttccaacaaatatattgctctgtattctcaactagcttaactttgatccctaactaaaaaatgtttgctggtcccatcaacatatgcatttatgagatcaccaataagatagtatgatttcagggggtctaggaaaggtggtaatccccatatatttctctcattcacttggatgtagcctgctatttcattattagcatttctttcatttgcttaagattttgatcttgtgaagggtgctccctcctaagacataagcatttcaaacttacacttcagtgtgaaggacttttctgaaggcaaataagataggtcaatattcacagaatatgagggtacttgaagtaaaagaagaagctgtcactacatacaggatatttcatgtgtgtgtgtgtgtatgtgtatgtgtgtgtcatcagagatctgaaatacacaaacatggttatcatcttacacaaaaatccaaagatgtttcatttcagtaaattgatttatgttaactaaggatccaggaggcagtctataattcatgttgcacttctagttaagtttagagggaggaatatttggctagagaactgtgatctgttatctgcatggatccagaaatcagacatccaaattttcaagaaccacactacatttcaagccttctgtcacatattcaccccaatacactcatatctgtagaactatatgtccagattgttgatctagactatctgaaaaatgccaatcctactcttaggccaacccttttaggtaggttatctattcagaaagacataccgttttcaaagtttcgcctattggttctggagtcagaaataaactttctctatgagaatatggttcaacagacccatcatcttttccttttttgcattatctcctagagaagaattctacgaattttgcaccatgctagtttcctaaaatccagttcctttttccttgatctttatttaaggtcatgatccagaaaaccttaagaatcatttcgatcatctgatctcttcttcttaattccttgttaatttcactctacctataatttacagtgggtataacatttcacattcacaaatgtacatgtgcaaaaatgtgtttttgcaaaactaaacttaatgtagctttacaaccttatagtatctgtttccacaagatagccaaaaacttataccaattcaaagttattcactcacttccaattaagaactttgtatctttgtgtgccaccagatcaatccaggagtttctctactttgctatccttctccatagaagttaaataagtttccaggtggctgaaatattgtgacttattgtcctgggataaggtgagggctatctggccttcctgttacatcatgtcctctttgaccgttgctaagatgtggcttgtaacacttgatcgtgcacatccatttctggccctgctacatctgctgtggttatctgagacccaagctcagaccccagacaacacttgacatcatgtaagcccaacaagcaaagccagttagccccttctgtgctcttccttcagggctgacgaattcttgccggccttttccaggctacactgaggtgctcacattgatgccctgcctttcaagtatccacttcagctttggttggacttggagcacttctaagaggcctgcagtctcctaaactatcctctgataggccaggtcttctcttctaagacctaaggtttctgacagtgtttacataatccatcctgaacaacagattcattctaagataccaagcagttactcctggcccctgattcttccttcctactctctggatgcacctttgtctcttgggggtgggaacctgctctgggatcattactcaagatatcccccctctacaagtcatgccatagacattctaatatgagccctccatcgttgtcaggatttggagtttaataaaactttttttttttttttttttgtgagacagagtctcactgtgttgcccaggctggaatgtagtggcgccatctcactgcaagctctgcctcccgggttcacaccattctcctgcctcagcctcccgagtagctgggactacaggtgcccaccaccatgcccagctaattttttgtatttttagtagagatggagtttcaccatgttagccaggctggtttcgatgtcctgaccttgtgatttgcccgcctcggcctcccaaaaaacttttttctgtaagaaattccagctcatactgtagcaggacttgcacttatggctcgtatttctgctattttcagcaatgtctgatttgatgttggaaatttagtaataatttatttctttctggcagtttctggtcacccctggggacagtacttatggaagatagttttggttttcttagggacttccagtaagctgaaacttccctctattccttcatattttatttaaagcttgtttccataaaagtcatcacaaaataaaccactttatcatctttgttttttttttctttttgtacaggcattgcttgctacatttattaacttgtcaaggttacttaatctaagggttgtgtccctgtgaaagacaaaatgcacttggtaattaaagagattattttattcagtcaaaccattcattaatgaagagcaagaacacctggggtttagaaaggcaggtaaacaagagggccatgaagaaggataggcagggagacttagaggtttggagaagagtgtggagggcattcttattgtggaatataccaggcagggtgattcttggtggttagccgtttcccagaacaccagtaaaggattaaagttcaacatcgtcagttctcctttttgttcaagaagaatattattctttgttctgtaatctgatgattacttagaaggttaaaaaaaaagccaacaaaaaaaaaaccctttacaaacttttactaaagcagacaaggtaaacacaagctctttttaaaaatcctgtaaataaacccatcaaaccttaactaactttgaccatggtaaataaatttcccctttgtttttttggagaactttgtacatctattcaggttttgtcttgcacaacaacagtcagtcatttcaccttaggacaaaaccattcttttcagcagacaagctgagctcatgaattatacaactcacaactttctgcagccacccattccttatagtacaactttacgaagtggtaaaaatcagcatgttcattaacaggcccaagtatataatctccaagtaacagaaaataagaggcaaaatatagataaacttaagactttgctttgtttcagtactctgtcttactaggaaatgatttaggtattcaataaatatctatcaattaactaactttagtgtaaatctgaggttttaagtggcctaaagatcttggaaattatcttcaagctgacatactataaaacaaaattactattgaaataaggttggtcatgataataatttatttggttaaacacaaatttatactttccataattttaaacattaatcttaaacattagtaatacaagcttaataaatcagtaaacttgtatacatttacacagaacattcccaaatagaaataaaaatctatgtatatattatgcttaaccctgataaatcagagaagacatagctgtttttattaaaaccaaaaatattaaactagtcttgtttgccaaagctttatctaaattatgtgaacttgaattcctaaatcatatccaagttagtttctgtaaaaataatttttaaatcaagacattgaaagtatttgagattcagttttcacttattttttattttttaatttttttcctttttgtggagaacgggatcacactatattgcccaggcaggtctccaactcctgagctcaagctatcgtctcacctcggcctccctaagagctgggattacaggcgtgagccaccgcgcccagctagattcaattttcttaatttctggaaatattaggaatattcaatttatataagtatttacttatctctgaaataacaagaatagagcaccattaagagattttataatctaatgactaatatcatcctgtggtagagaaatgttacacattcacacatgacaggtaaaggcctctctgaattataaatacataaacctgcaggcatagagagagcttacagtttcaattctgaaattttagccatgggtcaagtataaatacataattacaaaactcattggttca

SEQ ID NO: 2 - protein, 192 aa, Homo sapiens
MGKGRAGRVGTTALPPRLKEMKSQESAAGSKLVLRCETSSEYSSLRFKWFKNGNELNRKNKPQNIKIQKKPGKSELRINKASLADSGEYMCKVISKLGNDSASANITIVESNATSTSTTGTSHLVKCAEKEKTFCVNGGECFMVKDLSNPSRYLCKCPNEFTGDRCQNYVMASFYKAEELYQKRVLTITGIC

SEQ ID NO: 3 - protein, 422 aa, Homo sapiens
MRWRRAPRRSGRPGPRAQRPGSAARSSPPLPLLPLLLLLGTAALAPGAAAGNEAAPAGASVCYSSPPSVGSVQELAQRAAVVIEGKVHPQRRQQGALDRKAAAAAGEAGAWGGDREPPAAGPRALGPPAEEPLLAANGTVPSWPTAPVPSAGEPGEEAPYLVKVHQVWAVKAGGLKKDSLLTVRLGTWGHPAFPSCGRLKEDSRYIFFMEPDANSTSRAPAAFRASFPPLETGRNLKKEVSRVLCKRCALPPRLKEMKSQESAAGSKLVLRCETSSEYSSLRFKWFKNGNELNRKNKPQNIKIQKKPGKSELRINKASLADSGEYMCKVISKLGNDSASANITIVESNATSTSTTGTSHLVKCAEKEKTFCVNGGECFMVKDLSNPSRYLCKCPNEFTGDRCQNYVMASFYSTSTPFLSLPE

SEQ ID NO: 4 - protein, 204 aa, Homo sapiens
GRNLKKEVSRVLCKRCALPPRLKEMKSQESAAGSKLVLRCETSSEYSSLRFKWFKNGNELNRKNKPQNIKIQKKPGKSELRINKASLADSGEYMCKVISKLGNDSASANITIVESNATSTSTTGTSHLVKCAEKEKTFCVNGGECFMVKDLSNPSRYLCKCPNEFTGDRCQNYVMASFYKHLGIEFMEAEELYQKRVLTITGIC

SEQ ID NO: 5 - protein, 163 aa, Homo sapiens
GRNLKKEVSRVLCKRCALPPRLKEMKSQESAAGSKLVLRCETSSEYSSLRFKWFKNGNELNRKNKPQNIKIQKKPGKSELRINKASLADSGEYMCKVISKLGNDSASANITIVESNEIITGMPASTEGAYVSSATSTSTTGTSHLVKCAEKEKTFCVNGGECF

SEQ ID NO: 6 - protein, 85 aa, Homo sapiens
FYQLGLHLLSLEHIQSFFLFFFLRRSLALSPRLECSGRISTHCKLRLPDSRHSPASDPGVAGTTGACAISMNRAAIRTKTVLRSS

SEQ ID NO: 7 - protein, 47 aa, Homo sapiens
MWCEMFYGQKMEMRCRNWRLRINLKTKSRFWPDTDAKVTPMLSLLLR

SEQ ID NO: 8 - protein, 19 aa, Homo sapiens
MWCEMFYGQKMEMRCRNWR

SEQ ID NO: 9 - protein, 65 aa, Homo sapiens
YGQKMEMRCRNWRLRINLKTKSRFWPDTDAKVTPMLSLLLRYKLPYFKQLFHLFNSIPFLSLFHM

SEQ ID NO: 10 - protein, 141 aa, Homo sapiens
MKKRNEMIFLATLKNKALPPRLKEMKSQESAAGSKLVLRCETSSEYSSLRFKWFKNGNELNRKNKPQNIKIQKKPGKSELRINKASLADSGEYMCKVISKLGNDSASANITIVESNATSTSTTGTSHLVKCAEKEKTFCVN

SEQ ID NO: 11 - protein, 193 aa, Homo sapiens
MKKRNEMIFLATLKNKALPPRLKEMKSQESAAGSKLVLRCETSSEYSSLRFKWFKNGNELNRKNKPQNIKIQKKPGKSELRINKASLADSGEYMCKVISKLGNDSASANITIVESNEIITGMPASTEGAYVSSESPIRISVSTEGANTSSSTSTSTTGTSHLVKCAEKEKTFCVNGGECFMVKDLSNPSRYLC

SEQ ID NO: 12 - protein, 146 aa, Homo sapiens
MKKRNEMIFLATLKNKALPPRLKEMKSQESAAGSKLVLRCETSSEYSSLRFKWFKNGNELNRKNKPQNIKIQKKPGKSELRINKASLADSGEYMCKVISKLGNDSASANITIVESNEIITGMPASTEGAYVSSATSTSTTGTSHLV

SEQ ID NO: 13 - protein, 645 aa, Homo sapiens [sequence omitted]

SEQ ID NO: 14 - protein, 637 aa, Homo sapiens [sequence omitted]

SEQ ID NO: 15 - protein, 211 aa, Homo sapiens
MSERKEGRGKGKGKKKERGSGKKPESAAGSQSPALPPRLKEMKSQESAAGSKLVLRCETSSEYSSLRFKWFKNGNELNRKNKPQNIKIQKKPGKSELRINKASLADSGEYMCKVISKLGNDSASANITIVESNEIITGMPASTEGAYVSSESPIRISVSTEGANTSSSTSTSTTGTSHLVKCAEKEKTFCVNGGECFMVKDLSNPSRYLCK

SEQ ID NO: 16 - protein, 640 aa, Homo sapiens [sequence omitted]

SEQ ID NO: 17 - protein, 462 aa, Homo sapiens [sequence omitted]

SEQ ID NO: 18 - protein, 241 aa, Homo sapiens
MSERKEGRGKGKGKKKERGSGKKPESAAGSQSPALPPRLKEMKSQESAAGSKLVLRCETSSEYSSLRFKWFKNGNELNRKNKPQNIKIQKKPGKSELRINKASLADSGEYMCKVISKLGNDSASANITIVESNEIITGMPASTEGAYVSSESPIRISVSTEGANTSSSTSTSTTGTSHLVKCAEKEKTFCVNGGECFMVKDLSNPSRYLCKCPNEFTGDRCQNYVMASFYSTSTPFLSLPE

SEQ ID NO: 19 - protein, 156 aa, Homo sapiens
RGKGKGKKKERGSGKKPESAAGSQSPALPPRLKEMKSQESAAGSKLVLRCETSSEYSSLRFKWFKNGNELNRKNKPQNIKIQKKPGKSELRINKASLADSGEYMCKVISKLGNDSASANITIVESNATSTSTTGTSHLVKCAEKEKTFCVNGGECF

SEQ ID NO: 20 - protein, 171 aa, Homo sapiens
KGKGKKKERGSGKKPESAAGSQSPALPPRLKEMKSQESAAGSKLVLRCETSSEYSSLRFKWFKNGNELNRKNKPQNIKIQKKPGKSELRINKASLADSGEYMCKVISKLGNDSASANITIVESNEIITGMPASTEGAYVSSATSTSTTGTSHLVKCAEKEKTFCVNGGECF

SEQ ID NO: 21 - protein, 198 aa, Homo sapiens
MFLFERLPGDQSCFSFSFLLLALPPRLKEMKSQESAAGSKLVLRCETSSEYSSLRFKWFKNGNELNRKNKPQNIKIQKKPGKSELRINKASLADSGEYMCKVISKLGNDSASANITIVESNEIITGMPASTEGAYVSSESPIRISVSTEGANTSSSTSTSTTGTSHLVKCAEKEKTFCVNGGECFMVKDLSNPSRYLC

SEQ ID NO: 22 - protein, 164 aa, Homo sapiens
MFLFERLPGDQSCFSFSFLLLALPPRLKEMKSQESAAGSKLVLRCETSSEYSSLRFKWFKNGNELNRKNKPQNIKIQKKPGKSELRINKASLADSGEYMCKVISKLGNDSASANITIVESNATSTSTTGTSHLVKCAEKEKTFCVNGGECFMVKDLSNPSRYLC

SEQ ID NO: 23 - protein, 122 aa, Homo sapiens
MKSQESAAGSKLVLRCETSSEYSSLRFKWFKNGNELNRKNKPQNIKIQKKPGKSELRINKASLADSGEYMCKVISKLGNDSASANITIVESNATSTSTTGTSHLVKCAEKEKTFCVNGGECF

SEQ ID NO: 24 - protein, 175 aa, Homo sapiens
GSKLVLRCETSSEYSSLRFKWFKNGNELNRKNKPQNIKIQKKPGKSELRINKASLADSGEYMCKVISKLGNDSASANITIVESNEIITGMPASTEGAYVSSATSTSTTGTSHLVKCAEKEKTFCVNGGECFMVKDLSNPSRYLCKCPNEFTGDRCQNYVMASFYSTSTPFLSLPE

SEQ ID NO: 25 - protein, 128 aa, Homo sapiens
GSKLVLRCETSSEYSSLRFKWFKNGNELNRKNKPQNIKIQKKPGKSELRINKASLADSGEYMCKVISKLGNDSASANITIVESNATSTSTTGTSHLVKCAEKEKTFCVNGGECFMVKDLSNPSRYLCK

SEQ ID NO: 26 - protein, 192 aa, Homo sapiens
GSKLVLRCETSSEYSSLRFKWFKNGNELNRKNKPQNIKIQKKPGKSELRINKASLADSGEYMCKVISKLGNDSASANITIVESNEIITGMPASTEGAYVSSESPIRISVSTEGANTSSSTSTSTTGTSHLVKCAEKEKTFCVNGGECFMVKDLSNPSRYLCKCPNEFTGDRCQNYVMASFYSTSTPFLSLPE

SEQ ID NO: 27 - protein, 157 aa, Homo sapiens
SKLVLRCETSSEYSSLRFKWFKNGNELNRKNKPQNIKIQKKPGKSELRINKASLADSGEYMCKVISKLGNDSASANITIVESNATSTSTTGTSHLVKCAEKEKTFCVNGGECFMVKDLSNPSRYLCKCPNEFTGDRCQNYVMASFYSTSTPFLSLPE

SEQ ID NO: 28 - protein, 254 aa, Homo sapiens
RCETSSEYSSLRFKWFKNGNELNRKNKPQNIKIQKKPGKSELRINKASLADSGEYMCKVISKLGNDSASANITIVESNEIITGMPASTEGAYVSSESPIRISVSTEGANTSSSTSTSTTGTSHLVKCAEKEKTFCVNGGECFMVKDLSNPSRYLCKCPNEFTGDRCQNYVMASFYKHLGIEFMEAEELYQKRVLTITGICIALLVVGIMCVVAYCKTKKQRKKLHDRLRQSLRSERNNTMNIANGPHHPNPPPE

SEQ ID NO: 29 - protein, 552 aa, Homo sapiens
KSELRINKASLADSGEYMCKVISKLGNDSASANITIVESNEIITGMPASTEGAYVSSESPIRISVSTEGANTSSSTSTSTTGTSHLVKCAEKEKTFCVNGGECFMVKDLSNPSRYLCKCPNEFTGDRCQNYVMASFYKHLGIEFMEAEELYQKRVLTITGICIALLVVGIMCVVAYCKTKKQRKKLHDRLRQSLRSERNNTMNIANGPHHPNPPPENVQLVNQYVSKNVISSEHIVEREAETSFSTSHYTSTAHHSTTVTQTPSHSWSNGHTESILSESHSVIVMSSVENSRHSSPTGGPRGRLNGTGGPRECNSFLRHARETPDSYRDSPHSERYVSAMTTPARMSPVDFHTPSSPKSPPSEMSPPVSSMTVSMPSMAVSPFMEEERPLLLVTPPRLREKKFDHHPQQFSSFHHNPAHDSNSLPASPLRIVEDEEYETTQEYEPAQEPVKKLANSRRAKRTKPNGHIANRLEVDSNTSSQSSNSESETEDERVGEDTPFLGIQNPLAASLEATPAFRLADSRTNPAGRFSTQEEIQARLSSVIANQDPIAV

SEQ ID NO: 30 - protein, 125 aa, Homo sapiens
ASANITIVESNEIITGMPASTEGAYVSSESPIRISVSTEGANTSSSTSTSTTGTSHLVKCAEKEKTFCVNGGECFMVKDLSNPSRYLCKCQPGFTGARCTENVPMKVQNQESAQMSLLVIAAKTT

SEQ ID NO: 31 - protein, 296 aa, Homo sapiens
MEIYSPDMSEVAAERSSSPSTQLSADPSLDGLPAAEDMPEPQTEDGRTPGLVGLAVPCCACLEAERLRGCLNSEKICIVPILACLVSLCLCIAGLKWVFVDKIFEYDSPTHLDPGGLGQDPIISLDATAASAVWVSSEAYTSPVSRAQSESEVQVTVQGDKAVVSFEPSAAPTPKNRIFAFSFLPSTAPSFPSPTRNPEVRTPKSATQPQTTETNLQTAPKLSTSTSTTGTSHLVKCAEKEKTFCVNGGECFMVKDLSNPSRYLCKCPNEFTGDRCQNYVMASFYSTSTPFLSLPE

SEQ ID NO: 32 - protein, 196 aa, Homo sapiens
GGLGQDPIISLDATAASAVWVSSEAYTSPVSRAQSESEVQVTVQGDKAVVSFEPSAAPTPKNRIFAFSFLPSTAPSFPSPTRNPEVRTPKSATQPQTTETNLQTAPKLSTSTSTTGTSHLVKCAEKEKTFCVNGGECFMVKDLSNPSRYLCKCPNEFTGDRCQNYVMASFYKHLGIEFMEAEELYQKRVLTITGIC

SEQ ID NO: 33 - protein, 129 aa, Homo sapiens
PKNRIFAFSFLPSTAPSFPSPTRNPEVRTPKSATQPQTTETNLQTAPKLSTSTSTTGTSHLVKCAEKEKTFCVNGGECFMVKDLSNPSRYLCKCPNEFTGDRCQNYVMASFYKAEELYQKRVLTITGIC

SEQ ID NO: 34 - protein, 119 aa, Homo sapiens
RTPKSATQPQTTETNLQTAPKLSTSTSTTGTSHLVKCAEKEKTFCVNGGECFMVKDLSNPSRYLCKCPNEFTGDRCQNYVMASFYKAEELYQKRVLTITGICIALLVVGIMCVVAYCKT

SEQ ID NO: 35 - protein, 101 aa, Homo sapiens
DFKEQESMQIPKHISIEDITATSTSTTGTSHLVKCAEKEKTFCVNGGECFMVKDLSNPSRYLCKCQPGFTGARCTENVPMKVQNQEKAEELYQKRVLTITG

SEQ ID NO: 36 - protein, 101 aa, Homo sapiens
MQIPKHISIEDITATSTSTTGTSHLVKCAEKEKTFCVNGGECFMVKDLSNPSRYLCKCPNEFTGDRCQNYVMASFYKHLGIEFMEAEELYQKRVLTITGIC

SEQ ID NO: 37 - protein, 27 aa, Homo sapiens
MQIPKHISIEDITGAQMSLLVIAAKTT

SEQ ID NO: 38 - protein, 350 aa, Homo sapiens
GECFMVKDLSNPSRYLCKCQPGFTGARCTENVPMKVQNQEKHLGIEFMEAEELYQKRVLTITGICIALLVVGIMCVVAYCKTKKQRKKLHDRLRQSLRSERNNTMNIANGPHHPNPPPENVQLVNQYVSKNVISSEHIVEREAETSFSTSHYTSTAHHSTTVTQTPSHSWSNGHTESILSESHSVIVMSSVENSRHSSPTGGPRGRLNGTGGPRECNSFLRHARETPDSYRDSPHSERYVSAMTTPARMSPVDFHTPSSPKSPPSEMSPPVSSMTVSMPSMAVSPFMEEERPLLLVTPPRLREKKFDHHPQQFSSFHHNPAHDSNSLPASPLRIVEDEEYETTQEYEPAQ

SEQ ID NO: 39 - protein, 165 aa, Homo sapiens
MCVVAYCKTKKQRKKLHDRLRQSLRSERNNTMNIANGPHHPNPPPENVQLVNQYVSKNVISSEHIVEREAETSFSTSHYTSTAHHSTTVTQTPSHSWSNGHTESILSESHSVIVMSSVENSRHSSPTGGPRGRLNGTGGPRECNSFLRHARETPDSYRDSPHSER

SEQ ID NO: 40 - DNA, 24 bp, Homo sapiens
cagttctggaaacttttctgtgtg

SEQ ID NO: 41 - DNA, 25 bp, Homo sapiens
cagatccacaagttctacaatagca

SEQ ID NO: 42 - DNA, 26 bp, Homo sapiens
ttttctttactggtgctctctagtgt

SEQ ID NO: 43 - DNA, 20 bp, Homo sapiens
tgcaggcatagaattctcca

SEQ ID NO: 44 - DNA, 26 bp, Homo sapiens
gagtagttgggactacagatgcacac

SEQ ID NO: 45 - DNA, 21 bp, Homo sapiens
cagcttgggcaacaaagtaag

SEQ ID NO: 46 - DNA, 20 bp, Homo sapiens
ctcaaattttgggggctcac

SEQ ID NO: 47 - DNA, 26 bp, Homo sapiens
caatattatacaatttctggcagcat

SEQ ID NO: 48 - DNA, 20 bp, Homo sapiens
atactgaagggcaggggttt

SEQ ID NO: 49 - DNA, 23 bp, Homo sapiens
attttctgggtgatttcctcatt

SEQ ID NO: 50 - DNA, 20 bp, Homo sapiens
aggcttctggaccctcaaat

SEQ ID NO: 51 - DNA, 20 bp, Homo sapiens
ctcagctttgccctctgaat

SEQ ID NO: 52 - DNA, 20 bp, Homo sapiens
agggcaggaacctttcatct

SEQ ID NO: 53 - DNA, 20 bp, Homo sapiens
tagcgagaaagttggggaga

SEQ ID NO: 54 - DNA, 20 bp, Homo sapiens
agtgagtagggctggctgct

SEQ ID NO: 55 - DNA, 20 bp, Homo sapiens
gctgctaatatggccccttc

SEQ ID NO: 56 - DNA, 21 bp, Homo sapiens
ccacatgtccaactgaagagg

SEQ ID NO: 57 - DNA, 27 bp, Homo sapiens
tctccatgtgtaaaacaatacatatca

SEQ ID NO: 58 - DNA, 27 bp, Homo sapiens
cttttaatcatgaaagaatagcaaaaa

SEQ ID NO: 59 - DNA, 27 bp, Homo sapiens
tgttgttgtatatttcagaatttcctt

SEQ ID NO: 60 - DNA, 19 bp, Homo sapiens
ggcatgtcccaatttggtt

SEQ ID NO: 61 - DNA, 20 bp, Homo sapiens
tgtcccagctgatctaagca

SEQ ID NO: 62 - DNA, 23 bp, Homo sapiens
gagttttgaggatcctagagcaa

SEQ ID NO: 63 - DNA, 24 bp, Homo sapiens
gaagggctaaaaggagaattcata

SEQ ID NO: 64 - DNA, 23 bp, Homo sapiens
tttgcttatggtgtcattctttc

SEQ ID NO: 65 - DNA, 22 bp, Homo sapiens
ggagttcctgggttctaatctc

SEQ ID NO: 66 - DNA, 20 bp, Homo sapiens
ccacagcatgcaaaatgaac

SEQ ID NO: 67 - DNA, 20 bp, Homo sapiens
tgtaggatgccaaggaggtt

SEQ ID NO: 68 - DNA, 20 bp, Homo sapiens
ggcagcaatacaaacacagc

SEQ ID NO: 69 - DNA, 20 bp, Homo sapiens
ctagggtcaatgggtgagga

SEQ ID NO: 70 - DNA, 20 bp, Homo sapiens
tttgggatgtttcagccatt

SEQ ID NO: 71 - DNA, 20 bp, Homo sapiens
tggaaggctccatgaaagtg

SEQ ID NO: 72 - DNA, 20 bp, Homo sapiens
agaagcaaggatccccagtt

SEQ ID NO: 73 - DNA, 24 bp, Homo sapiens
gcaaacataaagtatgaccccttg

SEQ ID NO: 74 - DNA, 20 bp, Homo sapiens
acattgcctccaaccaagtc

SEQ ID NO: 75 - DNA, 20 bp, Homo sapiens
caggtatgagccacctctcc

SEQ ID NO: 76 - DNA, 20 bp, Homo sapiens
tgcagcagtagtgaccctgt

SEQ ID NO: 77 - DNA, 21 bp, Homo sapiens
atcaccctgacactgaggaga

SEQ ID NO: 78 - DNA, 20 bp, Homo sapiens
ggcctggaaaaagtgtgtgt

SEQ ID NO: 79 - DNA, 20 bp, Homo sapiens
gcccgtgaatctcttgtgtt

SEQ ID NO: 80 - DNA, 20 bp, Homo sapiens
gcaacttcatgcctgtagca

SEQ ID NO: 81 - DNA, 20 bp, Homo sapiens
caccctgtgaaaatggctct

SEQ ID NO: 82 - DNA, 20 bp, Homo sapiens
ggttcttcgaaatggcaagt

SEQ ID NO: 83 - DNA, 19 bp, Homo sapiens
ggcgagcagagtgagacac

SEQ ID NO: 84 - DNA, 21 bp, Homo sapiens
tctgtgacgcaattcaatgat

SEQ ID NO: 85 - DNA, 21 bp, Homo sapiens
accagcctggctttaaaacat

SEQ ID NO: 86 - DNA, 20 bp, Homo sapiens
gcaaagcttctccacactcc

SEQ ID NO: 87 - DNA, 20 bp, Homo sapiens
aacctggaggttcaagtgga

SEQ ID NO: 88 - DNA, 20 bp, Homo sapiens
tgtcactatggcccactgaa

SEQ ID NO: 89 - DNA, 20 bp, Homo sapiens
gaaaagcatggcagatttga

SEQ ID NO: 90 - DNA, 20 bp, Homo sapiens
cccagaaagcaggcaagtag

SEQ ID NO: 91 - DNA, 20 bp, Homo sapiens
catgaaaaagacgcaagcaa

SEQ ID NO: 92 - DNA, 20 bp, Homo sapiens
cccttagaagaggccaggtt

SEQ ID NO: 93 - DNA, 18 bp, Homo sapiens
aggttgcgctctcctgct

SEQ ID NO: 94 - DNA, 20 bp, Homo sapiens
ttagccaagcacagtggtgt

SEQ ID NO: 95 - DNA, 19 bp, Homo sapiens
ttggttccctgacccctaa

SEQ ID NO: 96 - DNA, 20 bp, Homo sapiens
acaggaagactgccatttgc

SEQ ID NO: 97 - DNA, 21 bp, Homo sapiens
aagcctttgctcatgttctca

SEQ ID NO: 98 - DNA, 20 bp, Homo sapiens
aaatttcatgatgcggaagg

SEQ ID NO: 99 - DNA, 20 bp, Homo sapiens
acgctttttgaccacacaca

SEQ ID NO: 100 - DNA, 20 bp, Homo sapiens
cccatggaactaccacacaa

SEQ ID NO: 101 - DNA, 20 bp, Homo sapiens
agggcctttccttcaaaatg

SEQ ID NO: 102 - DNA, 20 bp, Homo sapiens
aagcagcaggcaaaatgagt

SEQ ID NO: 103 - DNA, 20 bp, Homo sapiens
gatgcaaaggcaagtccagt

SEQ ID NO: 104 - DNA, 1006 bp, Homo sapiens
cggtttttttgccttttctattttgccttttttttttttgcccttatacctcttcgcctttctgtggttccatccacttcttccccctcctcctcccataaacaactctcctacccctgcacccccaataaataaataaaaggaggagggcaaggggggaggaggaggagtggtgctgcgaggggaaggaaaagggaggcagcgcgagagagccgggcagagtccgaaccgacagccagaagcccgcacgcacctcgcaccatgagatggcgacgcgccccgcgccgctccgggcgtcccggcccccgggcccagcgccccggctccgccgcccgctcgtcgccgccgctgccgctgctgccactactgctgctgctggggaccgcggccctggcgccgggggcggcggccggcaacgaggcggctcccgcgrgggcctcggtgtgctactygtccccgcccagcgtgggatcggtgcaggagctagctcagcgcgccgcggtggtgatcgagggaaaggtgcacccgcagcggcggcagcagggggcactcgacaggaaggcggcggcggcggcgggcgaggcaggggcgtggggcggcgatcgcgagccgccagccgcgggcccacgggcgctggggccgcccgccgaggagccgctgctcgccgccaacgggaccgtgccctcttggcccaccgccccggtgcccagcgccggcgagcccggggaggaggcgccctatctggtgaaggtgcaccaggtgtgggcggtgaaagccgggggcttgaagaaggactcgctgctcaccgtgcgcctggggacctggggccaccccgccttcccctcctgcgggaggctcaaggaggacagcaggtacatcttcttcatggagcccgacgccaacagcaccagccgcgcgccggccgccttccgagcctctttcccccctctggagacgggccggaacctcaagaaggaggtcagccgggtgctgtgcaagcggtgcg

SEQ ID NO: 105 - DNA, 592 bp, Homo sapiens
gcgcctgcctccaacctgcgggcgggaggtgggtggctgcggggcaattgaaaaagagccggcgaggagttccccgaaacttgttggaactccgggctcgcgcggaggccaggagctgagcggcggcggctgccggacgatgggagcgtgagcaggacggtgataacctctccccgatcgggttgcgagggcgccgggcagaggccaggacgcgagccgccagcggygggacccatcgacgacttcccggggcgacaggagcagccccgagagccagggcgagcgcccgttccaggtggccggaccgcccgccgcgtccgcgccgcgctccctgcaggcaacgggagacgcccccgcgcagcgcgagcgcctcagcgcggccgctcgctctccccmtcgagggacaaacttttcccaaacccgatccgagcccttggaccaaactcgcctgcgccgagagccgtccgcgtagagcgctccgtctccggcgagatgtccgagcgcaaagaaggcagaggcaaagggaagggcaagaagaaggagcgaggctccggcaagaagccggagtccgcggcgggcagccagagcccag

SEQ ID NO: 106 - DNA, 178 bp, Homo sapiens
ccttgcctccccrattgaaagagatgaaaagccaggaatcggctgcaggttccaaactagtccttcggtgtgaaaccagttctgaatactcctctctcagattcaagtggttcaagaatgggaatgaattgaatcgaaaaaacaaaccacaaaatatcaagatacaaaaaaagccagg

SEQ ID NO: 107 - DNA, 51 bp, Homo sapiens
agatcatcactggyatgccagcctcaactgaaggagcatatgtgtcttcag

SEQ ID NO: 108 - DNA, 1160 bp, Homo sapiens
gcctctcctgccgccgctgctgctgccgccgccgccaccgccgctggtcctccttctgcttttacttctcctgcatgacagttgttttcttcatctgagcagacaccagcttcagatgctcgaggtgagaaacatgcctttcagtttgggctactggtttacttaattaatcagccggcagctccgtcgatctattttcgtccctgtcctcttgacgagcccgggatggtttggagtagcatttaaaagaactagaaaagtggcccagaaacagcagcttaaagaattattacgatatactttgattttgtagttgctaggagcttttcttccccccttgcatctttctgaactcttcttgattttaataatggccttggacttggacgatttatcgatttccccctgtaagatgctgtatcatttggttgggggggcctctgcgtggtaatggaccgtgagagcggccaggccttcttctggaggtgagccgatggagatttattccccagacatgtctgaggtcgccgccgagaggtcctccagcccctccactcagctgagtgcagacccatctcttgatgggcttccggcagcagaagacatgccagagccccagactgaagatgggagaacccctggactcgtgggcctggccgtgccctgctgtgcgtgcctagaagctgagcgcctgagaggttgcctcaactcagagaaaatctgcattgtccccatcctggcttgcctggtcagcctctgcctctgcatcgccggcctcaagtgggtatttgtggacaagatctttgaatatgactctcctactcaccttgaccctggggggttaggccaggaccctattatttctctggacgcaactgctgcctcagctstgtgggtgtcgtctgaggcatacacttcacctgtctctagggctcaatctgaaagtgaggttcaagttacagtgcaaggtgacaaggctgttgtctcctttgaaccatcagcggcaccgacaccgaagaatcgtatttttgccttttctttcttgccgtccactgcgccatccttcccttcacccacccggaaccctgaggtgagaacgcccaagtcagcaactcagccacaaacaacagaaactaatctccaaactgctcctaaacttt

SEQ ID NO: 109 - DNA, 675 bp, Homo sapiens
ctacatctacatccaccactgggacaagccatcttgtaaaatgtgcggagaaggagaaaactttctgtgtgaatggaggggagtgcttcatggtgaaagacctttcaaacccctcgagatacttgtgcaagtaagaaaagaaatcctgtgtgtcgcttatgtctataactccttgtttcagatgattctatgtctcatgatgtattgttgctttttttccaattttgttgcatcatgttgaataatgctgttttatatgtagagtgttttaaaacattcacaccattcgtcatcactcctctgtcatatgcagaattgttttttgctcttttcaatgtgtgtgaggtgttttttgtttttgtttttgttttttgccatgttatttatagtgttgctttccttgtggtttttcttgttgttattcagaaaagatgtgcagatatcacagaggcctataacttttggtatctacttctacatccaatgtatgaattaagctgtaagataatgttgctttcttatcccrgtgatcacctgccaaatgaataagacaacaaagagaagcagaagggcagaagattatttactgacatatatctattacacttgggattgtctyactgttgcataactattttttaaacggagtttagttttatattgctagtaaaaaaa

SEQ ID NO: 110 - DNA, 103 bp, Homo sapiens
aggcggaggagctgtaccagaagagagtgctgaccataaccggcatctgcatcgccctccttgtggtcggcatcatgtgtktggtggcctactgcaaaaccaa

SEQ ID NO: 111 - DNA, 127 bp, Homo sapiens
gaaacagcggaaaaagctgcatgaccgtcttcggcagagccttcggtctgaacgaaacaataygatgaacattgccaatgggcctcaccatcctaacccaccccccgagaatgtccagctggtgaat

SEQ ID NO: 112 - DNA, 846 bp, Homo sapiens
gtatgtgtcagccatgaccaccccggctcgtatgtcacctgtagatttccacacgccaagctcccccaaatcgcccccttcggaaatgtctccaccygtgtccagcatgacggtgtccatgccttccatggcggtcagccccttcatggaagaagagagacctctacttctcgtgacaccaccaaggctgcgggagaagaagtttgaccatcaccctcagcagttcagctccttccaccacaaccccgcgcatgacagtaacagcctccctgctagccccttgaggatagtggaggatgaggagtatgaaacgacccaagagtacgagccagcccaagagcctgttaagaaactcgccaatagcyrgcgggccaaaagaaccaagcccaatggccacattgctaacagattggaagtggacagcaacacaagctcccagagcagtaactcagagagtgaaacagaagatgaaagagtaggtgaagatacgcctttcctgggcatacagaaccccctggcagccagtcttgaggcaacacctgccttccgcctggctgacagcaggactaacccagcaggccgcttctcgacacaggaagaaatccaggccaggctgtctagtgtaattgctaaccaagaccctattgctgtataaaacctaaataaacacatagattcacctgtaaaactttattttatataataaagtattccaccttaaattaaacaatttattttattttagcagttctgcaaatagaaaacaggaaaaaaacttttataaattaaatatatgtatgtaaaaatgtgttatgtgccatatgtagcaattttttacagtatttc

SEQ ID NO: 113 - DNA, 558 bp, Homo sapiens
aatcgggcagccattagaaccaaaacagttctgaggagctcccaggctgcaatgtggtgcgaaatgttttatggacagaaaatggaaatgaggtgcagaaattggaggtgagattcagagatagctgattggttacagctcagcctttgccttgtttgaacatggtttgaacagttgattgactgaagctaggctgctgtgattggctgatactttactatttgttacaaaggcaaattcctaatttaagctttcaaattgtttaartactaagttaggttttactttgttacttaggactcatatcgaggtttctaaagcccacatctgatacgatttaacattacctatgtgaagaattactaagcagaaacattttgaaagcctcatgacctgaatcgtattaaatacttaacaattgaatttgtctcaataataattatgtttaaaattatgaatgctggtttgtaaaaaaaaaagccacaaattttaaaattctgatataatctaatatctggtattcagctttgtattatcattttaaaatttaatgaacat

SEQ ID NO: 114 - DNA, 178 bp, Homo sapiens
gctaagaataaacttgaagacaaagagtagattttggccagacactgatgctaaagtcaccccgatgctgtctttgcttctaaggtataaattaccttattttwagcaactttttcaccttttcaactctatccctttcctcagcctctttcatatgtgaaataaaatattcacttac

SEQ ID NO: 115 - DNA, 262 bp, Homo sapiens
atgaaatttcagtctttattcaagrtcaagtgcaactgtctctttgaggaaagtcctttgaccgccatttctccccttcagaaggcaaacacctgggggagaagatctgcttaaggacctggtaactgacaaagaatggaatgggagcgagaaccgcctagccatcccttctccttgcacagtcatgaaacaaaagttgaaaaggagcctggttttacttgaccagtcataaattaccataaaataaaatgagatattagga

SEQ ID NO: 116 - DNA, 260 bp, Homo sapiens
caagcactttataccactttttataaaataagccctcactttcattacattatttaactygtatttctgccttgtgttatagatagaaagtatattattatttctactttatagctgaagaaactgagtccaaaatgggtagagcaactggcactaaagatcacctagccagtccgagwtcacacagtcagtattaggactggggccttgtgccttccagtgcagggtcccttacaccagtcatgacatagatgcccaga

SEQ ID NO: 117 - DNA, 379 bp, Homo sapiens
caagcactttataccactttttataaaataagccctcactttcattacattatttaactygtatttctgccttgtgttatagatagaaagtatattattatttctactttatagctgaagaaactgagtccaaaatgggtagagcaactggcactaaagatcacctagccagtccgagwtcacacagtcagtattaggactggggccttgtgccttccagtgcagggtcccttacaccagtcatgacatagatgcccagatcatgcatgacttgatgtaaaaacaacaatttttgttgtcccagtttgagtccttataaatttcccctgtcaaagaaataaacatgcaactctcagaaattatcttttatggagctttt

SEQ ID NO: 118 - DNA, 401 bp, Homo sapiens
ggactggggccttgtgccttccagtgcagggtcccttacaccagtcatgacatagatgcccagatcatgcatgacttgatgtaaaaacaacaatttttgttgtcccagtttgagtccttataaatttcccctgtcaaagaaataaacatgcaactctcagaaattatcttttatggagcttttaaaggccactttgccaargggagctatatarccatgacataaacatgaagatggattgacagaaaatactctttcacaggctggaggaaatattgggggaaagaaattttctcagactgcccttccaacgtggcatggatcatggaggtcagcttttctagcttgtgcccagaggtctgtctacctcagctgtgtcttgtgattgataggaggataca

SEQ ID NO: 119 - DNA, 401 bp, Homo sapiens
gtgccttccagtgcagggtcccttacaccagtcatgacatagatgcccagatcatgcatgacttgatgtaaaaacaacaatttttgttgtcccagtttgagtccttataaatttcccctgtcaaagaaataaacatgcaactctcagaaattatcttttatggagcttttaaaggccactttgccaargggagctatatarccatgacataaacatgaagatggattgacagaaaatactctttcacaggctggaggaaatattgggggaaagaaattttctcagactgcccttccaacgtggcatggatcatggaggtcagcttttctagcttgtgcccagaggtctgtctacctcagctgtgtcttgtgattgataggaggatacagtctcccagggtg

SEQ ID NO: 120 - DNA, 401 bp, Homo sapiens
tcacaggctggaggaaatattgggggaaagaaattttctcagactgcccttccaacgtggcatggatcatggaggtcagcttttctagcttgtgcccagaggtctgtctacctcagctgtgtcttgtgattgataggaggatacagtctcccagggtgtgatttaaggtggagcttataggtctacaaagctcaagctctwatcaagctactatggcatgatagtacaattataaagaaagtagactagtttctataagctgtgtataaaaccaggcccaccctaacatttgcagggcctaggccaagagtgtatgtagagtctcatataccgtatgtctaaatatttcaaagttataaaccaagaagggcctgtggcccaaactgtgttcccaccctaag

SEQ ID NO: 121 - DNA, 401 bp, Homo sapiens
gtggggccctctaaagcagagggtcctggaggagtctcttcagtccaatggctgaattactccaagactctttcatacaaaagttagctgggcatggtggcatgcgcctgtagtcccagctacttgggagactgaggcgggagaatcacttgaacctgggaggcggaggttgcagtgagccaagattgtgtcattgccctytagcctgggtgacagagcaagactccatctcaaaaaacaaaacaaaacaaaacaaaaaaaactctttctttactttataaccatatggcaggacatctcagttcatctatgacctgtggttttaaagtaaattctgtttaaagttatctttaaaatagctttatttttgttaaaatagagccatatcttcatctgcggga

SEQ ID NO: 122 - DNA, 401 bp, Homo sapiens
ggcaggacatctcagttcatctatgacctgtggttttaaagtaaattctgtttaaagttatctttaaaatagctttatttttgttaaaatagagccatatcttcatctgcgggaaatcatattgactccatgataagctatattctggaaaatagtcagtgtgctgacgattgctacctgtgagtagctcacccaacccayaggcaaagtagcaaagagagaggcatggcaacccccaacgtgagaggcttgtagacaacccacagttctagcagatgtcagtgcaacggggcaaatttcatccccctcagagcatggctctgggcaccactggacacatctgtttcaggataatttgaagtccagttgttcagacagagttgatcttaagaccatggtgg

SEQ ID NO: 123 - DNA, 401 bp, Homo sapiens
agtcaactcaggctgccataacagaataccacagaccaggtggtttaaacagcagatatttacctttcacagctctggaaactgggaagtctgggattaagctgccagcatggtcaggttctggtgaggggtcacctcttggcttgcaggtgtccaccttcttgccgtgtgctgtgtgtggtggagagatctctccttacragggccctgattccatcatgagcccatctaaccatgattacctcccagaagccccacctccaaataccatcccattgggggttagggtttcaacatatgaattttgagaggacacagacattcagtccataacaccaaatctgtattcatcctagttcagcacagagcagaacctatgtttacccaatatcctttgaata

SEQ ID NO: 124 - DNA, 401 bp, Homo sapiens
gccaaaaattatagcattcaaaaaatgtgccacaaaaacaacaaagttgacaactactgatctggaacctttctaaatgtgaccagtcagagaccatagccaatattttctattgtctatagaatgggatgggcagagaaaacagctaacaaaaaaggaaaaaacaacccaaaatatttcatggtttcagctttattagcmtaacagtcaagttgttytggttccacgacttttaaattaagcgaaggagaactctcccatcaataggttcattgtgatgccaaactttacatattttggaaaaacattcatttacccgccaggcaagctgcctsctctcttagagttcgtggtagggaactataagcataaagacctttctgaggaggttttccttattt

SEQ ID NO: 125 - DNA, 401 bp, Homo sapiens
tcaaaaaatgtgccacaaaaacaacaaagttgacaactactgatctggaacctttctaaatgtgaccagtcagagaccatagccaatattttctattgtctatagaatgggatgggcagagaaaacagctaacaaaaaaggaaaaaacaacccaaaatatttcatggtttcagctttattagcmtaacagtcaagttgttytggttccacgacttttaaattaagcgaaggagaactctcccatcaataggttcattgtgatgccaaactttacatattttggaaaaacattcatttacccgccaggcaagctgcctsctctcttagagttcgtggtagggaactataagcataaagacctttctgaggaggttttccttattttattgactgcctcatat

SEQ ID NO: 126 - DNA, 401 bp, Homo sapiens
agagaaaacagctaacaaaaaaggaaaaaacaacccaaaatatttcatggtttcagctttattagcmtaacagtcaagttgttytggttccacgacttttaaattaagcgaaggagaactctcccatcaataggttcattgtgatgccaaactttacatattttggaaaaacattcatttacccgccaggcaagctgcctsctctcttagagttcgtggtagggaactataagcataaagacctttctgaggaggttttccttattttattgactgcctcatatatttacaacttcccaatttattttttcagactgctaactcctgtgttcctagattcccatttttcaattgattgtgggctttttctagggttacagatttaacttccatgcaagtgg

SEQ ID NO: 127 - DNA, 401 bp, Homo sapiens
aaacaggttgcctatagccttacaagtggcctccttggtttttagtggcatagtgcaggtgagccatatattatgcttctcaatttatttccattggtcagaaaactggtaaaaaattccttttcaatggtatagttttcgaatctcaacagagacttctttggtcttagtgatgagtcttcatggtattttggcttgcaygtagtaacaataatcaagtcattcacccagtgcaagattttggtgtctttatttttaactatttgtattgtgcattatcacatagataaccatttgttttgctggtctcattgctcacgtagaagtctgaatataattctttctcagagtgtgggaaatcatggattgatattcttagtttttgatgtagtgctttttat

SEQ ID NO: 128 - DNA, 401 bp, Homo sapiens
gaagtcaggaactgtgagccacctgccatcttaatttgacatctagtctcactactttcaagcacctccacttcaaaatactcttacaagtgaatcaccattgttaaatggatctttgaaggaattttgacaaccagactgaaaacaatctagacatcttagatatttgtggcttcacagaaaataaaataaaacaacccwtttcagcatcaagttatattttccatagctacagaatctggtaaataactatgttactcattcatctaggtagtttgatactacctactgatactggagttggggagggaagtgctgggaagggaagggtgtggtccctggctagggctccacccctgggcctgtgcccatgaacctaggtgaggacaggcatttctgtt

SEQ ID NO: 129 - DNA, 401 bp, Homo sapiens
cccactccatctcccttctggctcccccatctgctgagagctacttccgctcgctaaaatctttgcactcattctccaagcccatgtgtgatctgattctgctggtataccaaggcaagaaccctgggatacagaaagccctctgtccttgcgataaggcaaagggtctaattgagctgactaatgcaagccgcctacagrgagctaaactgaaagagcacactgtaacacatgcccactggggcttcaggagctgtaaacattcrcccctagacactgctgtggggttggagccccacagcctgcccgtctgcatgctcccccttgaggtttgagcagcggggcaccagagaagtgagccactctccctgtggcacaccctgtgaggggsacaagggaac

SEQ ID NO: 130 - DNA, 401 bp, Homo sapiens
cactcattctccaagcccatgtgtgatctgattctgctggtataccaaggcaagaaccctgggatacagaaagccctctgtccttgcgataaggcaaagggtctaattgagctgactaatgcaagccgcctacagrgagctaaactgaaagagcacactgtaacacatgcccactggggcttcaggagctgtaaacattcrcccctagacactgctgtggggttggagccccacagcctgcccgtctgcatgctcccccttgaggtttgagcagcggggcaccagagaagtgagccactctccctgtggcacaccctgtgaggggsacaagggaacttttcccattttactaccaaggccagtgacatgaatgatcaaatacyaaccagctacattttatt

SEQ ID NO: 131 - DNA, 401 bp, Homo sapiens
ccgcctacagrgagctaaactgaaagagcacactgtaacacatgcccactggggcttcaggagctgtaaacattcrcccctagacactgctgtggggttggagccccacagcctgcccgtctgcatgctcccccttgaggtttgagcagcggggcaccagagaagtgagccactctccctgtggcacaccctgtgaggggsacaagggaacttttcccattttactaccaaggccagtgacatgaatgatcaaatacyaaccagctacattttatttaatttttaatttttttagttgtcagaagattttattaactgtaagccagggaatggactgatcgattttattatgcaaatcaatgaaaaaaaaaaactcttttagaaggacacaaacacacaca

SEQ ID NO: 132 - DNA, 401 bp, Homo sapiens
caggagctgtaaacattcrcccctagacactgctgtggggttggagccccacagcctgcccgtctgcatgctcccccttgaggtttgagcagcggggcaccagagaagtgagccactctccctgtggcacaccctgtgaggggsacaagggaacttttcccattttactaccaaggccagtgacatgaatgatcaaatacyaaccagctacattttatttaatttttaatttttttagttgtcagaagattttattaactgtaagccagggaatggactgatcgattttattatgcaaatcaatgaaaaaaaaaaactcttttagaaggacacaaacacacacacgtgctcacagggaagctggttgttggttgagagtcaggtcagaaccttggagagct

SEQ ID NO: 133 - DNA, 401 bp, Homo sapiens
gctctcaaccagctacattttaaaccctattttctctaaagatacatcaacagattagcttattcttcagtcctggatctaacataatttgtacagtaaagtgaagataaagtttattcagattatttgtacaagtactttctcatcaaagtgcagcagtctactttctgtttcccatgggtgataggagatagggttaaygaaacagcagtaatttagagaccagttttagctgcatattgcartctttctttagaactatcctaaaagctgtctgttgctttgaaatgaatcttacttccatttcctccttttcttttggacctgctcaggagcaataaaatagagcaaatgtaaacagcagaaatgagacagaaggggacttggagataaaagaaatt

SEQ ID NO: 134 - DNA, 401 bp, Homo sapiens
catcaacagattagcttattcttcagtcctggatctaacataatttgtacagtaaagtgaagataaagtttattcagattatttgtacaagtactttctcatcaaagtgcagcagtctactttctgtttcccatgggtgataggagatagggttaaygaaacagcagtaatttagagaccagttttagctgcatattgcartctttctttagaactatcctaaaagctgtctgttgctttgaaatgaatcttacttccatttcctccttttcttttggacctgctcaggagcaataaaatagagcaaatgtaaacagcagaaatgagacagaaggggacttggagataaaagaaatttgtttcttctgcattcttcagaatgcagagtagttcctggcaga

SEQ ID NO: 135 - DNA, 401 bp, Homo sapiens
aggctctgctttctaagaaatcaggagtaaggtactgactaccccagagctgtctcacttggagctctttccctcaagcttttctgtttagtgtttttgtttgccatccaaggacataaaaagagaaggatccttcctcaaaaaccatgccctcagtctcctatgttactcctttttttggtgctgtgtaatagttatttyacaccataataaatattagctatacttgccattgtataggtgtaggggaggatgaggaggttcaaactgtattcccaacatcataacttcctgttacatccaagagctgttgaacaatatcgagtttcccaacrtatgtgtgattggaatcaaaggaggagaagaaagggagacagttcagaagataatatctgtggaaa

SEQ ID NO: 136 - DNA, 401 bp, Homo sapiens
tcctcaaaaaccatgccctcagtctcctatgttactcctttttttggtgctgtgtaatagttatttyacaccataataaatattagctatacttgccattgtataggtgtaggggaggatgaggaggttcaaactgtattcccaacatcataacttcctgttacatccaagagctgttgaacaatatcgagtttcccaacrtatgtgtgattggaatcaaaggaggagaagaaagggagacagttcagaagataatatctgtggaaataatggctgggaattttcaaaaaataatgacagaaaccaaaccacagatccaggagtctcagagaacagcaagaacaaaaaaacaaaaaacactcactcctctccctacatacacatgctgtggcatagcataa

SEQ ID NO: 137 - DNA, 401 bp, Homo sapiens
ggaggagaagaaagggagacagttcagaagataatatctgtggaaataatggctgggaattttcaaaaaataatgacagaaaccaaaccacagatccaggagtctcagagaacagcaagaacaaaaaaacaaaaaacactcactcctctccctacatacacatgctgtggcatagcataaaaccaaaaaaacagacaaaaycttaaaggtagtcagagaaaacraaacattacataaagmggaacaaaggtacagtggtgcaaagaattacagtaaactttttgtcagaaactatgcaagccagagacaatggagcaacaactctaaagtgctgaaagaaaagtatttgttaaccaaaaattctacaccttgtgaaaataccttaaaaactcaaggtaaat

SEQ ID NO: 138 - DNA, 401 bp, Homo sapiens
tcagaagataatatctgtggaaataatggctgggaattttcaaaaaataatgacagaaaccaaaccacagatccaggagtctcagagaacagcaagaacaaaaaaacaaaaaacactcactcctctccctacatacacatgctgtggcatagcataaaaccaaaaaaacagacaaaaycttaaaggtagtcagagaaaacraaacattacataaagmggaacaaaggtacagtggtgcaaagaattacagtaaactttttgtcagaaactatgcaagccagagacaatggagcaacaactctaaagtgctgaaagaaaagtatttgttaaccaaaaattctacaccttgtgaaaataccttaaaaactcaaggtaaataaagattttcttagacacacaaa

SEQ ID NO: 139 - DNA, 401 bp, Homo sapiens
gtggaaataatggctgggaattttcaaaaaataatgacagaaaccaaaccacagatccaggagtctcagagaacagcaagaacaaaaaaacaaaaaacactcactcctctccctacatacacatgctgtggcatagcataaaaccaaaaaaacagacaaaaycttaaaggtagtcagagaaaacraaacattacataaagmggaacaaaggtacagtggtgcaaagaattacagtaaactttttgtcagaaactatgcaagccagagacaatggagcaacaactctaaagtgctgaaagaaaagtatttgttaaccaaaaattctacaccttgtgaaaataccttaaaaactcaaggtaaataaagattttcttagacacacaaaaatggtgagaattcat

SEQ ID NO: 140 - DNA, 401 bp, Homo sapiens
taaatattagctatacttgcctaggtataggtgtagtaggtggtgaaaatggaaataatgaaggtaaaattaaattaattttctaaatattcttaattactctaaaacaatggttctgaaccccaggagatccctttccattacgattcttccccatgggaacactggcaatgtctggagacatttttgattgtcacagcyggggtggtgctactaatgctagtaggtaaaggtctgggatgctgctgaacaccctactatacatgggacagactcacacaaacagaattctccagtccaaaatattaatattgctgaagtttagagaatctgctctaaaagataacttctaaagcaaaaacagtaacactgtattgtgtgtttacagtatatataaaagt

SEQ ID NO: 141 - DNA, 401 bp, Homo sapiens
agagaatctgctctaaaagataacttctaaagcaaaaacagtaacactgtattgtgtgtttacagtatatataaaagtagagggtatgaaagcaatagtacgattaatgggggggaggaattgggactaactattgtgatgtccctacatagcacaggaaacaatgttatttgaaggtaggctcttgttaattaaagacgyatattttaaaacctaagacagccaataaaaataattaagataaaatggaataataaaatacattcaattaaaaaagaagagcctgaaaaggagagcagaaactaaagaatagatagaacaaatataaaacagctagcaagatggtggattttaattgagccatttaaataaccacataaacctcatttawtgagacctga

SEQ ID NO: 142 - DNA, 401 bp, Homo sapiens
attaaagacgyatattttaaaacctaagacagccaataaaaataattaagataaaatggaataataaaatacattcaattaaaaaagaagagcctgaaaaggagagcagaaactaaagaatagatagaacaaatataaaacagctagcaagatggtggattttaattgagccatttaaataaccacataaacctcatttawtgagacctgaattaacttaaaaccaaatcaaagacatgacaaaagaaaaatgttatgtcattatccctcatggacatatctatccacatcaaaatacattagtcccacttattggtgggggatattttccaagaccctcagtggattcctggaactgcagatgataccaaaccctatatatactatgcatgaatttcttg

SEQ ID NO: 143 - DNA, 401 bp, Homo sapiens
cagtggattcctggaactgcagatgataccaaaccctatatatactatgcatgaatttcttgttccttcttcacaacagataaagtcacagatggaaaattagttttcatcatggatcttagtaacttcagcatacgattttttttctttccatattaagtcaagaactttcaccttttcacttaaaggaggcactgatgscttcttttttggtagatctgaatggctagcatcactactcttgtgctctagggccattacaaagtaaactaagaatgacttgaacacaarcatcacaatactggatactatgatggttggtctgataaataagacaactcctgagtgagtaacaggtgtgggrgagggtacagacacatggataccctggacaaaaggag

SEQ ID NO: 144 - DNA, 401 bp, Homo sapiens
gatggaaaattagttttcatcatggatcttagtaacttcagcatacgattttttttctttccatattaagtcaagaactttcaccttttcacttaaaggaggcactgatgscttcttttttggtagatctgaatggctagcatcactactcttgtgctctagggccattacaaagtaaactaagaatgacttgaacacaarcatcacaatactggatactatgatggttggtctgataaataagacaactcctgagtgagtaacaggtgtgggrgagggtacagacacatggataccctggacaaaaggaggattcaccttcctggtggggcagagccaggcggtgtgagattttgtcatgctatccagagtggtgtgcaatttaaaatgygtgaattgtt

SEQ ID NO: 145 - DNA, 401 bp, Homo sapiens
agaactttcaccttttcacttaaaggaggcactgatgscttcttttttggtagatctgaatggctagcatcactactcttgtgctctagggccattacaaagtaaactaagaatgacttgaacacaarcatcacaatactggatactatgatggttggtctgataaataagacaactcctgagtgagtaacaggtgtgggrgagggtacagacacatggataccctggacaaaaggaggattcaccttcctggtggggcagagccaggcggtgtgagattttgtcatgctatccagagtggtgtgcaatttaaaatgygtgaattgtttatttgtggaattttccatttaatatttccagaacaccactgaccataggtaactgaaactgtagaaagtgaa

SEQ ID NO: 146 - DNA, 401 bp, Homo sapiens
ttgaacacaarcatcacaatactggatactatgatggttggtctgataaataagacaactcctgagtgagtaacaggtgtgggrgagggtacagacacatggataccctggacaaaaggaggattcaccttcctggtggggcagagccaggcggtgtgagattttgtcatgctatccagagtggtgtgcaatttaaaatgygtgaattgtttatttgtggaattttccatttaatatttccagaacaccactgaccataggtaactgaaactgtagaaagtgaaaccatgaataagaggagactattgtattggcaagttgaatatagcaattttcaactttttattwaaaaagttgaaaattactaggctgggtgcagtaattaaaattaaaaaatttaa

SEQ ID NO: 147 - DNA, 401 bp, Homo sapiens
caggcggtgtgagattttgtcatgctatccagagtggtgtgcaatttaaaatgygtgaattgtttatttgtggaattttccatttaatatttccagaacaccactgaccataggtaactgaaactgtagaaagtgaaaccatgaataagaggagactattgtattggcaagttgaatatagcaattttcaactttttattwaaaaagttgaaaattactaggctgggtgcagtaattaaaattaaaaaatttaaaaatattaaaatttttattttaatatttttaaattaaaatatgtaaaaatactaggctgggcgcagtggctcatgtctgtaatcccagcacttcaggaggccgaggttggggaactgcctgaggccaggagtttgagaccagcctga

SEQ ID NO: 148 - DNA, 401 bp, Homo sapiens
gggaactgcctgaggccaggagtttgagaccagcctgaccaacatggtgaaaccctgtctctactaaaaatacaaaaattagctgggtatgggggtgtgcctgtaatcccagctacttgggaaactgaggcaggagaatcacttgaacctgggaggcagaggttgcagtgagctgagatagcaccactgccattcagcctrggtgacatagtgagactccatctcaaaaacaaaaacaaaaacaataaacaaaaaaacactacacagtgaagtgaggcttacatgggcatgtcatgctggttcaatactaaaaaaattcagtcaatgtaactcatcatattaatgatgtaaagaaaagccacttgatcatatcgacagatgcagaaaaagcatktgaaaaa

SEQ ID NO: 149 - DNA, 401 bp, Homo sapiens
tcagcctrggtgacatagtgagactccatctcaaaaacaaaaacaaaaacaataaacaaaaaaacactacacagtgaagtgaggcttacatgggcatgtcatgctggttcaatactaaaaaaattcagtcaatgtaactcatcatattaatgatgtaaagaaaagccacttgatcatatcgacagatgcagaaaaagcatktgaaaaattcaccagccattcatgatgaaaagtgtcagcaaactactaacagaaggaacttcctcagcctgataaagggcatataaaaaaactgtatagctaacatcatttttaatgctgaaagactgaattcttactctctgaaatcaagaacaaagcaggaacgccactctccccagtcctataatttacagcactag

SEQ ID NO: 150 - DNA, 401 bp, Homo sapiens
ggaacttcctcagcctgataaagggcatataaaaaaactgtatagctaacatcatttttaatgctgaaagactgaattcttactctctgaaatcaagaacaaagcaggaacgccactctccccagtcctataatttacagcactagatgtcttaactagtccactgaagcaataagaagaaataaaaggcatggaggttgraagaagaaaaaaactgcccctatttgcagacaacatgaacatttataaaatctaggaatttagaaaaaggcttctagaatgaaaagtaggtttatcaaaattgcgggacacaggccaatacccaaaaccaactgtttttccataaactggtaacaatcggaaaccacaatctgaaaatgatatcatttactatagctcca

SEQ ID NO: 151 - DNA, 401 bp, Homo sapiens
cccagcaagttttttcttgtaaataaagacaagctgattctaaagtttatatgcaaaagcaatggaactagaatagctaaaacaacttagaaaaagaatacagttagaggaatctcattactagattttaagacttactataaagcaacagtaatcaaggcaatgggatagacacatagatcgatggaacagaaaagataycccataaatagaccttcacaaatatggtaatttgatttttgataaaagtgtaaaataattcaatggagaaagggtggtcttttcaacacatggtgttggaacaatctgtcattcacatgcaaaaggagacatgcatcctcaactttatccctcataccaaaaattaattgactcatagctctaagtattcactgtaagac

SEQ ID NO: 152 - DNA, 401 bp, Homo sapiens
tcacattgctgtgtgcctagtgctgtatccgcctatgttgctgccttgagaatgcagcttcatgactgggacttgcttcagtctagggcagggagaacaaaaagaggaaaaaaaaatgaggatttgcccacagatcctccatcccacgggggcccttctttcaggttttctggttagaaacagaggatttctctgggaacyttttctgcccacagttgctgtgcagttcctggatttgcattgccctgcagtctaagctggaagatatggaatgaaaagatgtcaggaaattcactgccctctgggttactttcaggatttgattttcttcccaaatatgcctgctattatttactaatcagcctccagatgctcactttatgtattctgtccaaggattt

SEQ ID NO: 153 - DNA, 401 bp, Homo sapiens
tgcatttaacatctgctagccacagagaagacaaaccttgtagctgtagaagaccccaaactgctgcagcccttttgagctctctgagccagagactccctgtattgcttctgggcaataccacctggacacatgtgccccctcaccgatccccgtctcccctggaatttcccttgccctcttcttctgggtgtctctggramgtcttctgctgtgaggactttcccttttctgcaatcctgtccaataaagcttgcgttgtgcaatattgccttcttgttctatctttctgtcttttctttgatcagcccccagatcctcaaactcaccattgttctctgctattatttttcttttaatgygcattaatacacacacatatatatacacacacatataca

SEQ ID NO: 154 - DNA, 401 bp, Homo sapiens
catttaacatctgctagccacagagaagacaaaccttgtagctgtagaagaccccaaactgctgcagcccttttgagctctctgagccagagactccctgtattgcttctgggcaataccacctggacacatgtgccccctcaccgatccccgtctcccctggaatttcccttgccctcttcttctgggtgtctctggramgtcttctgctgtgaggactttcccttttctgcaatcctgtccaataaagcttgcgttgtgcaatattgccttcttgttctatctttctgtcttttctttgatcagcccccagatcctcaaactcaccattgttctctgctattatttttcttttaatgygcattaatacacacacatatatatacacacacatatacaca

SEQ ID NO: 155 - DNA, 401 bp, Homo sapiens
ctggaatttcccttgccctcttcttctgggtgtctctggramgtcttctgctgtgaggactttcccttttctgcaatcctgtccaataaagcttgcgttgtgcaatattgccttcttgttctatctttctgtcttttctttgatcagcccccagatcctcaaactcaccattgttctctgctattatttttcttttaatgygcattaatacacacacatatatatacacacacatatacacatatatacactctttggaattcttttccttgtatgtctcttcaatattctctcacacttccttcaaatgtctgcccaaaccttgcttctcaatgagtccttccttgaccaccctttctgatactgcaacctgccttccattttacctccctgcttttcca

SEQ ID NO: 156 - DNA, 401 bp, Homo sapiens
tttctctgctaatagatctataaaatgtggaaagagatgttttacaatctctcatagcaatcctattttttgttttacataatttgatgcttttatatgaaacataaagtttcatggctattataaattttatgtagattttgcctttcatgaatataaaatgaccttcttttctatggaaaccttttttttttttttttwaccttatattaaattttgtttgaaatcaaaggggccatcctttctgtttttaaaatttcatttgtctggtaagcctttgcttattctttcaaaacatttctcattttaatgtgtctctttaagcttaaatagcgtatgtctagatttttaaaatctttttttaaatggggagttgaaataacttaaatgtattatcataa

SEQ ID NO: 157 - DNA, 401 bp, Homo sapiens
gcccaccactcacctcctgcttttcagcctggttcctcccaggccctggactggtatcagtctgtggcccagggattggggacccctgctatatacaggggtaaaaaaagagggaagaagagagaatttggttaaaatatattcatagaaggaaggaagtgtgaagagaaatcacggtccttattgcttccattggttatrtggttgcagatccatgctgcccagtgaaagttcttgtaatgatgcaaatagtttgtacctgcactgttcaatgcagaagccacctgtggccagcaaacactcaaaatgtggctggtgaaatgagaaactaatattttaattgcatttaattttaattaatttacatttggatttaaatagccacrtaaggctggtggctc

SEQ ID NO: 158 - DNA, 401 bp, Homo sapiens
gcttccattggttatrtggttgcagatccatgctgcccagtgaaagttcttgtaatgatgcaaatagtttgtacctgcactgttcaatgcagaagccacctgtggccagcaaacactcaaaatgtggctggtgaaatgagaaactaatattttaattgcatttaattttaattaatttacatttggatttaaatagccacrtaaggctggtggctccaatgctgtacagcgtagctgtgaatagaatgatattccctttgtcttcagccatacgtcagtgaactgggatctctcccagtctaattctttgctcaatttcaggacaaccgagaaacctagctaattttgcctctatgagacttccatagtcattcactcaaaactcatcattgaacatgtta

SEQ ID NO: 159 - DNA, 401 bp, Homo sapiens
ctaggtcagaaacaatatcctttgaggcaccatgcctgtcatgactatatatgaggtattcagtaatggttgcacttgtagaagcatagttgggaaggaaagcatatcaaagtccaaataataagtgaagataaatggcacctttatcaggaaggaaggttgccaatgcaattaaccttgtgctaggtagctggctaggtrgctatcccccaaaggcatggtattatattgggggctccaggttggtcttttaatgggaaagttgagcaaacagcagatgtgttatctagggaagagagggttggctgacaatagagaaggtmattttatctacctgattattaaaagcatccctgcactgggtattcacgtttgatacaaatattctctccctttgggcc

SEQ ID NO: 160 - DNA, 401 bp, Homo sapiens
aagtgaagataaatggcacctttatcaggaaggaaggttgccaatgcaattaaccttgtgctaggtagctggctaggtrgctatcccccaaaggcatggtattatattgggggctccaggttggtcttttaatgggaaagttgagcaaacagcagatgtgttatctagggaagagagggttggctgacaatagagaaggtmattttatctacctgattattaaaagcatccctgcactgggtattcacgtttgatacaaatattctctccctttgggcccattctgagggtcctctagaatagtagctgaaattggggttaaaagctgcttaaattttgacagtctgctttacttctctaaataccagacatcttcaccaggttattcccttgatcttgtg

SEQ ID NO: 161 - DNA, 401 bp, Homo sapiens
attgaatcaatttgcatttaaatcctactattgtgattttatctttttgaaaattatcctaccttgagtcttttttctctcttttctatgcatattagtcttttattcttagtcttttttttttctttgtatcttggctttctgcttctgtttcatagaagtcatgcattctaataagtatggcaaactaatggaaatttytcctttctttagcaaatcattttcagatatttgttatccttgtacatttttaaggtgatctttcctttcattttcattgcagtattttaaaaatcaactttagtgaggtatcatttacatttattaatatacacccattttaaatgaacacttcaatgccctttgtatatatccatatattcactaccacaatcaagata

SEQ ID NO: 162 - DNA, 401 bp, Homo sapiens
atgttcagtggtaactcttcattctaggttgtcagaactcagatacctcctgtactgcctgaggaagttgttcagcttccagcttccctgtaggtttttcctagaagccattctttgcctggttagtcctacgttgcctgttgttcaatgtctgaaagtagttgttacatatattttgtctagatttctagatgtttatgrtcggaagcctagtctggtactggtacatcatcatggctggaagcaaaaatcatattgtagtattttcttttttaatttttattttttgagtcagggtcrgggtctcactttgtcacctaggctagaatgtagtggtacaatcatagctcactaaaacgtcatactcctggcttaagtgatccttcctccccagcctgctg

SEQ ID NO: 163 - DNA, 401 bp, Homo sapiens
cctagaagccattctttgcctggttagtcctacgttgcctgttgttcaatgtctgaaagtagttgttacatatattttgtctagatttctagatgtttatgrtcggaagcctagtctggtactggtacatcatcatggctggaagcaaaaatcatattgtagtattttcttttttaatttttattttttgagtcagggtcrgggtctcactttgtcacctaggctagaatgtagtggtacaatcatagctcactaaaacgtcatactcctggcttaagtgatccttcctccccagcctgctgagtagctaggagtataggcactcaccatcaggcccagctgattcattgttttgttgttgttaaagatgggctcccattgtgttgtccaagctggtcttt

SEQ ID NO: 164 - DNA, 401 bp, Homo sapiens
ctcaggctggagtgtagtggtgtgatcttggctcgctgaaacctctgtctcccaggatcaagcgaatctcctgcctcagcctcctgagtagctggattacaggtgcatgccaccacacccagctactttttgtatttttagtagagacagggtttcaccatattggccaggctggtctcgaactcctgacctcatgatccrcccgcytcggcctcccaaagtgctaggattacaggcatgagccacagcacctggccatattactctttttagaaaaccagtctaattatttcttttctttttttttttttttttttttgagacagagtctctttctgtcatcaaaactggagtgaagtggcacagtcaccactcactgcagccttgacctcctgggctta

SEQ ID NO: 165 - DNA, 401 bp, Homo sapiens
ctggagtgtagtggtgtgatcttggctcgctgaaacctctgtctcccaggatcaagcgaatctcctgcctcagcctcctgagtagctggattacaggtgcatgccaccacacccagctactttttgtatttttagtagagacagggtttcaccatattggccaggctggtctcgaactcctgacctcatgatccrcccgcytcggcctcccaaagtgctaggattacaggcatgagccacagcacctggccatattactctttttagaaaaccagtctaattatttcttttctttttttttttttttttttttgagacagagtctctttctgtcatcaaaactggagtgaagtggcacagtcaccactcactgcagccttgacctcctgggcttaagcgat

SEQ ID NO: 166 - DNA, 401 bp, Homo sapiens
gtttacatttctaccataagtatatctttctcagtattttagtaagaaatgtggtaagcattaaaatttaaaccaggctgggtgtggtggctcatgcctgtaatgccagcactttgggaggccaaggtgggtggatcacgaggtcaggagttcaagaccagcctgaccaacatggtgaaaccctgtctctactaaaaatayaaaaattagccaggtgtggtggcacgcgcctgtgatcccagttactcaggaggttgaggcaggagaatcgcttgaaccccaggaggtggagatggcagtgagccgagattgtgccattgcactccagcctgggcaacagagcaagactccatcaaaaaaaaattaaaccagaaattccctttattcatttttagcccaga

SEQ ID NO: 167 - DNA, 401 bp, Homo sapiens
tcatttatatctcattaactagtttcctgtttttattttaaaacccagatatcacagtgaaatttaaactcatattcataaaggaaaacaatctgcaaagtccaatctagtttatatcattagtaagaataatagtatggtttaaataagatctatatatttttactaatattcgttctgctttcacaaatatattgccaygtgtagayctctccttcataccaagagttcagttggcaccatgaacagttcaaaacactaatacttgtgatcacagtattggttcttaattaaacgtacaattcccccccacacactatttatggattgctaaaacaatattttcacctttatctttggctgtcagatagcaagttggacagtgaagtagaactgacaga

SEQ ID NO: 168 - DNA, 401 bp, Homo sapiens
atctcattaactagtttcctgtttttattttaaaacccagatatcacagtgaaatttaaactcatattcataaaggaaaacaatctgcaaagtccaatctagtttatatcattagtaagaataatagtatggtttaaataagatctatatatttttactaatattcgttctgctttcacaaatatattgccaygtgtagayctctccttcataccaagagttcagttggcaccatgaacagttcaaaacactaatacttgtgatcacagtattggttcttaattaaacgtacaattcccccccacacactatttatggattgctaaaacaatattttcacctttatctttggctgtcagatagcaagttggacagtgaagtagaactgacagaaatgaaga

SEQ ID NO: 169 - DNA, 401 bp, Homo sapiens
atgtgtaacaatactcagttagtattgccaactatgtgtctgttgtcacatggcactatttaacactgagctgtggtgaccagagttttcagttgggtttcagacacatagaatggttggctaactcaatctccagcccctctggaggcagagctgatactgtgtaacccaaaacttctaccataaatcccattgctagawgatctgggatggcccaaggctcttagctaaactaagacagtcctgtcaggcagaacattctaagggttcagagattgtctcccaggatccaaggacaaaggtcagacctctctttgggcaagattaaattctgtattacacaataccagatgagcagctgtcttttgatggctgtaaatggatagtgaaggatattttca

SEQ ID NO: 170 - DNA, 401 bp, Homo sapiens
gtctccatgtcctgtagttcacctttttgagatgcccaggtgggaaggactccctggcagaacttccaacagacctgtgcgctgggagcaacgcgcactcgggtggagtcttgggaagtttgccccgtttccagtggggaggagcctggaccccctcttcctgggtggaacctgggattcagcctgcggggcagcaagcaygctagcaggactctggctttgagaagggtccctttttccccctttttgcccaataaatttcattttttctcacccttcaaagtgtccgcgagcctaatctctgatggtcatgtgacaagaacccggctcttagctgaactaaggaaaatgtcctacaacatttcgacataaacagccaaattccattctattttaatact

SEQ ID NO: 171 - DNA, 401 bp, Homo sapiens
gatgtaggtctttaacaattatgctaagtgaaataatccagacacagaaaaacaaatagcatgtggtctgtcttatatggtagaatctaaagaaggtgaatttgtagacggagagaattacagtggtgcttgtcaggcactgggtagcaggatggtttagagggaattggagagctgttggtcaaagggttcacgctttcwgttataagaacaacttctggggatctaatataccatatgagtggtgatggatgtactaattaagttgattatggtaaccattcacaacgtatatgtacatcaaatcattgttttgtacaccttgaacgtattcaatctttatcaattaaatattttaaaataaagaaatagatggggaaatatatttattgaacacctat

SEQ ID NO: 172 - DNA, 401 bp, Homo sapiens
gcttttttttctagtataaagagttcaattagggtaactctgccccttacctcatttgtcctggtgatacgtatgaaataacaccaatttgctagttagattaattgtgattagtgattagattaattgtgtgcactccacttcttcttgctcatcttccttttaggaggaaggctgcccttggaggggaaatgttccctmtgttcctttcgcccatgagaatgggcctgctgtcttgtccactactgcctgtgactggctcagaagtgggcctaatgctgggattcattgaatgtgccttcctacccagctgtatctttgtaaatattgatcttttagtttctatctttaatcttttatgtttatttttcaaatttttcagaagcttatttgggaagaag

SEQ ID NO: 173 - DNA, 401 bp, Homo sapiens
tttaaaaccaacccccgtgttctcttcacaaattgaagagtggagatttttggaaagtattacaccccttcttccccttcctagcatggataataaaatctcactctctttttgtcacacttcactcttgttatattggcttctttttacaagctacaagcagccagacccttttgccaattacatgcccattatgaggcytatggaaaatgttgtgattaaaggagttccttttccatgggcaccccatgtgtacttctgcaaaatggaacaatagcttgaaaagccttaccagatttgctgtctcagcttcccctgtgggtcttactgatcaaggacattatagtaaataaaaaaaaaatgagagagacaaagaagagagtcatggacttgtcccagca

SEQ ID NO: 174 - DNA, 401 bp, Homo sapiens
tattgatggtgttgaaacaaaagtattaatgcagcactattgaaggttagatgaaccaatgggactttctgtttgtctcccaacattgaaaggctccaacaagttttctccatttaccccagtttggagaaacttaaaaagtcagagattactcagaactggttggggtgacggttaagcaggttaatcaagattgatgargggccagggtctcctggccagacctcaggctggcaggggtcccaaggacatatgcacatgtgtagataaaatggtcagtggaaggagaagagacttttctgggactccttggtataggaggtcaatgcattgtaattccaaaagctgttggtgaagacttaacaggagttaaagttaagattgggggagtatatggagct

SEQ ID NO: 175 - DNA, 401 bp, Homo sapiens
aaacagtagattattgaggcttaaatacataaatttgtacctcagtacaattttatagcctcagtaattttagtcatgatttcaatcatacaaaaagactgctactcagtgatcgaccttgcaaacattcttctctcagtctcagaaagtgccaaacactgtttgctcttatatgggaaggatcccagtttatgtatactrtgctaccatagggtcatctgaactcactggtttactgtcataatttggtcagaagggatttggatttgatgtaggtctcaagtgtaataatacactatattgatgatgagatgataatattggaaactaaagagccaggttaagactgagttgaatgcagcgatgactcacatgaccaaccaaggctgatcagtaaattc

SEQ ID NO: 176 - DNA, 401 bp, Homo sapiens
cacttttctgggggatctggcaaagcaggggtggaaatctccctcctgctgccagtgtggttatatgatttttcccatataatctcactttttttttgtcccagtaagaagcactggagcactgcctgatgccaagggtcctaggaccagggatgtgactgtgtacatcctcgtaagcaaggatgatttctaggcaagaargtgtaactaacttttaaacatctatgccagaagtcctaagggcctgatagtgtgaattcacatctgtgaatattgctgtgttgcctagggattgggctagccctgacatccccgataggacagttctgtacccaggtaacctgaccctatctgaatggaaatggactgaaagggaggcatttgttagactagcatcactg

SEQ ID NO: 177 - DNA, 401 bp, Homo sapiens
cctctggtaggattaaagaagttggcatcacattgtagatccaagttcccctggggaatgaccccactcgaaataaggaaggctgtgagaggccttatggcacactcaaattaaattacatctacctgtaaacaccaatcatctaactctagtgtggggacccaaaattttttgcaaaacatttatcctaactgcattcgygccattagtacgcaataccaatgatatgcatggtagattaaacaacactggctcctaagacagaaaagggcctcaggagagataggtgcaggtctaggtatcctgggacaagctgagtttactcttaatgtggagcagcattcggaggaaaaagatttattaactagaagagacagaatagaggaaattctcttcaagga

SEQ ID NO: 178 - DNA, 401 bp, Homo sapiens
cttctcaaaagaagacatttatgcagccaaaaaaaacgtgaaaaaatgctcatcatcactggccatcagagaaatgcaaatcaaaaccacaatgagataccatctcacaccagttagaatggcgatcattaaaaagtcaggaaacaacaggtgctggagagggtgtggagaaataggaagacttttacactgttggtgggrctgtaaactagttcaaccattgtggaagtcggtgtggcgattcctcagggatctagaactagaaataccatttgacccagccatcccattactgggtatatacccaaaggattagacatcatgctgctataaagacccatgcacacgtatgtttattgcggcactattcacaatagcaaagacttggaaccaacccaaat

SEQ ID NO: 179 - DNA, 401 bp, Homo sapiens
ggaacctgaggacctaccacttgtgattgaatctgaagttgggggcagtctggtggggctacagccttaacctgtgcagatactaattccagttagtgtcagagttgaattgaatcataggtcatctagctggtacaggagaattgtacagtgtgggaaaaaaaatccatatctgactacagtagtgtagagtgtgagtayagagaaaaacagttgatttttcctatacattttatgtcagaagtgaagcacgtattgagaatggtgtgagtatagaaggaaaagcagtttgtgtttctctatatacaagcccaggccacatggagagatatgtgcaggtattctagccgacaaccccagctgaggtctcagctgatagaatcaacctccaactataagtg

SEQ ID NO: 180 - DNA, 401 bp, Homo sapiens
ctaacctaccgagcctgctgaaattgcagattatgcgaaaactaaatatagccgttattttaaaccactgcattatgaggtaattattatgcagccacacaaacaggaatggaacccattttattcaatgacagcttctgccactttgctgaagccttaatcatgaattatatggcaagaagtagatttacatttatgaayaggtcaagaggaaagaaatgaagtcttgttagaacaactgtgtttctggaaaaactttttctctggtaaaagtttcagcaattgtgttagtttctcgtggctgtcgtaatgttaccaccaatttggtggcttaaaacagcagaaatttatgctctcacagttctggaggccagaaatcagaaattggtatcactggtgac

SEQ ID NO: 181 - DNA, 401 bp, Homo sapiens
ctggaggccagaaatcagaaattggtatcactggtgacaccatgatgaacctggacaacattatggcaagtgaaacaaggcagacacagaaagataaatacaggctgatctcattcatatgtgaaatctcagaaagttgaacccataaaattagagagtaaaatggtagttaccagaggataggggaggggagtgaatagsgaaagggaagatatcgattaaaaggtacaaaatttcagctagacaggaggaatacacttagtgattcattgcacagaatggtgactataataaataataatgcattgtgtatttaaaaattgccaaaagagtagattctaaatgtttttaccacaaaaagggtaagtatggtaattagcttgatttgatcattccacaat

SEQ ID NO: 182 - DNA, 401 bp, Homo sapiens
aattctagaaacatataaaaggaattatacaccatgggtaagtaggatttattccaggaatgcaaagttagtttggcatctgaaaattaattagtataatatattgtatcaatagaattaaaaggaaaatgtatatgatctcaatagatgcaataaaagcatttgtcataattcaatactttccaagaatttatacaccaycaacaacccattaacctaggaatggaagagaacttcctcaatttgataaagagcatttataaaaagcccacagctaacactgtacttaatggtgaaagactagattattttctcttaagatcagaaacaagactctctgactgcttctatttgacattgtactggtggttctagtcagggcaatgaggcaagaaaaagaa

SEQ ID NO: 183 - DNA, 401 bp, Homo sapiens
ttttggcaccaggaagtggtttcatggaagacaatttttccacacactggtgggtgatgtgggggctggttttgagatgcaactattccacctcagatcatcaggcattagattctcgtaaggagtgcacaacctagatcccacacatgtgcagttcacaatagaggtcacactcctgtaagaatctaaggctggcactgwtctgacaggaggtggagctgagatggtaatgctcgcttgcccaccactcacctcctgctgtgaagcccgattcctaacaggccatggactagcatctagccatggcctgggggttggagaccccctgcttcaaaggacaccttcaagaaagtaaaaagacaggtcaaagaatgasagaatatgtttgcaaatcatatatc

SEQ ID NO: 184 - DNA, 401 bp, Homo sapiens
ctgtaagaatctaaggctggcactgwtctgacaggaggtggagctgagatggtaatgctcgcttgcccaccactcacctcctgctgtgaagcccgattcctaacaggccatggactagcatctagccatggcctgggggttggagaccccctgcttcaaaggacaccttcaagaaagtaaaaagacaggtcaaagaatgasagaatatgtttgcaaatcatatatctgataagggatttgtatctagaatatatacagagcatgtacaacccaataataaaaagacaacacaactaaaaatggacaaatattgaaaaccggaacaccacaaggatgcccactctcaccactcctattcagcatagtactggaaatcctagccagagcagtcaggcaagaga

SEQ ID NO: 185 - DNA, 401 bp, Homo sapiens
ctcatatctccaactcctttccctcatacacacaatagttttagaataacaatgccatgtgttctacaataataagagaagtgaaaattatttaagagcatttgccctattgtttttctaattctaaaagaaatacatatttaatatggaagagttataaaatagaaaaatcataaagaacaaaagttatttataatccartaacccatgtattatcaatgtgaacattttggaacatttgttattcttgaaaatggtttagatagtaaacttttgaatacaatgagcacctgtcccattatgtattttaaatgggagaataatgatgtgttctcagcttatataaaagtcccgaaccattcttcaaatattactaaaatattcttaagcatctatagaaa

SEQ ID NO: 186 - DNA, 401 bp, Homo sapiens
ttctgcagggcagatgctggctagttaagcttgcctgtaaatcatagtttgtccataaactccagcatattctatttagaaccacagagcgaaaaactaataaatacatttaaaaatcttagtagacattaactccagagaggttcttaatttttaacttgatcaaaattttagctatgtcttagtggtttggttgaattwtaagcagatattgagaactcgcattgctttataaaatgcttgggccgcatgtggtggctcacgcctgtaatccmagcactttgggaggctgaggcaggcagatcacttgaggcgaggagttcaagacgagactggccaacatggcaaaaccctgtctctattaaaaatacaaaaattagctgggcgtggtggtgggcgcc

SEQ ID NO: 187 - DNA, 401 bp, Homo sapiens
tttagaaccacagagcgaaaaactaataaatacatttaaaaatcttagtagacattaactccagagaggttcttaatttttaacttgatcaaaattttagctatgtcttagtggtttggttgaattwtaagcagatattgagaactcgcattgctttataaaatgcttgggccgcatgtggtggctcacgcctgtaatccmagcactttgggaggctgaggcaggcagatcacttgaggcgaggagttcaagacgagactggccaacatggcaaaaccctgtctctattaaaaatacaaaaattagctgggcgtggtggtgggcgcctgtaatcccagctactcgggaggctgaggcacgagaatcgcttgaacctgggaggcagaggttgtggtgagccg

SEQ ID NO: 188 - DNA, 401 bp, Homo sapiens
aaccctgtctcttctaaaaatacaaaaattagtcaggactggtggtgtgtgcctatagtctgcactacttgggagactgaggcttgagaatcacttgaaccagggagacagaggttgcagtgagctgagatcatgccactgccctccagcctggccaacagagagagactctatcttaaaaaaaaaaaagttataaaaaasaagtgatttgaaaaagaaaaagggctttaggaaggacacagaatataaacaaatctcctgtcctcatgacacttaagatttatagggattcctaagtctcctgtactgcatactcaaaatgcagggtcctaagacttacaggaaatattatactcaaatgcactttcttcattcctgtcttgaccatctgtgctgaatcc

SEQ ID NO: 189 - DNA, 401 bp, Homo sapiens
aaacgaataagaaatgtaaatatcctggctgctaattccttgtaagtctagaaagtggttaggtatttgacttgtctcctctggttcttaccctggccattcttgttgctaagaaggaatgatgtctcctgcaaagagcccaccaaacacatttctaccctaagtagcctgctcaaaactcatcaaaagccctactaagaygttttgctgcactgaaccctttcattttatagtttcctcatttagaattccctttcacacgtccattcattcattcaacaaatattaagggtctactatgtgccaggcctggtagtaagaatttggtatagacataatattccttcaagaagcttaaagccaggcacggtggctcatgcctgtaatccccacactttggg

SEQ ID NO: 190 - DNA, 401 bp, Homo sapiens
catggctgcatgaaatgaacaggcacttttctaatatgaacatacagtgaatgaattaataactgtatgtttctaagagccacatttctgttagaactagccatataaggcatatgactaatgaattcagatatttaatattgaagtttaggaaaatgtcatttccactgggctgagaattagagtcaggagcaaatcttyctatctccctctyctacacattcattcattcagcattgtgtgcctattatatgtcaagatagtataatgtatatatttaatattatatatagtatagtataatacatattggcacataaatatgttttttatatatatataatcatcgayagtaacatgtttataggcaatagcaattcaatgtggcaagttttatgaca

SEQ ID NO: 191 - DNA, 401 bp, Homo sapiens
aatgaacaggcacttttctaatatgaacatacagtgaatgaattaataactgtatgtttctaagagccacatttctgttagaactagccatataaggcatatgactaatgaattcagatatttaatattgaagtttaggaaaatgtcatttccactgggctgagaattagagtcaggagcaaatcttyctatctccctctyctacacattcattcattcagcattgtgtgcctattatatgtcaagatagtataatgtatatatttaatattatatatagtatagtataatacatattggcacataaatatgttttttatatatatataatcatcgayagtaacatgtttataggcaatagcaattcaatgtggcaagttttatgacaaggccatacacag

SEQ ID NO: 192 - DNA, 401 bp, Homo sapiens
ggaaaatgtcatttccactgggctgagaattagagtcaggagcaaatcttyctatctccctctyctacacattcattcattcagcattgtgtgcctattatatgtcaagatagtataatgtatatatttaatattatatatagtatagtataatacatattggcacataaatatgttttttatatatatataatcatcgayagtaacatgtttataggcaatagcaattcaatgtggcaagttttatgacaaggccatacacaggatgctatggagcatggaaaggaaggagtccctgagaacatgtcatcgaaactgacttcaaatggagatgtaggtatgagctggttgttagaaacggaatgtttgtgtcaccccgaaattcttgtgttgaaacccta

SEQ ID NO: 193 - DNA, 401 bp, Homo sapiens
tattttgttatggtagccttagcaggctaatacagtggtaaactctgcatatggaggagttgaaaaagagagagtagatggcaatttgggcagaaggggaattacctgcaaatgttcaagggagtggagataattcttcttaaactgtttatcagtccttcaggagataagttaacaacagaggataattatcccagagarctggtttctggcaaatgtctgaagggcatggtaggtcataaaatacccactggtggtattttatattctgaaaaccattttaatctacctttcatgacctggatgcttcagcctcctgtgcttcctcagaatttgataactgacccatgagacaaaaactgatcktttatctagaatcctctagattccagtacaactca

SEQ ID NO: 194 - DNA, 401 bp, Homo sapiens
gataagttaacaacagaggataattatcccagagarctggtttctggcaaatgtctgaagggcatggtaggtcataaaatacccactggtggtattttatattctgaaaaccattttaatctacctttcatgacctggatgcttcagcctcctgtgcttcctcagaatttgataactgacccatgagacaaaaactgatcktttatctagaatcctctagattccagtacaactcagcagctgtgaagcctctaaatttgcaacttgctttcttttaaactcagtagaatccctcagccagaaccaatcctcatgccaattttagaactgttcgatattcccaagaaaagaaaatggctggtgattgtcaactctcttaagaaagtctcttattttggggg

SEQ ID NO: 195 - DNA, 401 bp, Homo sapiens
caggcacacgccaccatgccctgctaatttttgcatttttagtagggacagggtttcaccatattggccaggctggtctggaactcctgaccttgtgatctgcccacctcggcctcccaaagtgctgggattacagctgtgagccaccgcgcccagctggaaatgttcttttgactctgaaattttagttcatcgagtccwcattgacttcacagctctctggtatctttaagtgtattatttttgtaatttatatgcttttttttcctggttactagcaggaacattgatccaccataaccaatttcatgtttctgagaagtgaagctcattttctgttaaagagaaagagagacatgaattccaaaacaggtaaaggtgtctataaaccagtaagttta

SEQ ID NO: 196 - DNA, 401 bp, Homo sapiens
aaagattgccttaggttaggccttatagcttaagaggcaaaaggaagtctcaagtctcctgtttgcttcagcccattaaccaggtttggagatcatacagaaaattaaggtttaagtgctaactagcagtgaaatgtaataaaaaactagttatgactctactgtggttttaaatggataaatgagatcgtgagtccaaasattcagaaactctgatactgttcatattgagagatttaactaaaaataagtttctgctggagagaagaatgaaaggtaagtacagaggaaggcaaggtacaaaggagattttctgagtccagtcagggttagcgtggagaccctgtgcacttggggaaatggaaaaagtggcaataaagagcaaattgtagatagaagca

SEQ ID NO: 197 - DNA, 401 bp, Homo sapiens
ggcaataaagagcaaattgtagatagaagcaatgaaggcccaaactggtaatgtcacacttttgctttgagcaggctggtaatgatttccccaggaaactcaactatgcaaataagaaagcttggaagtatgacttaacgattaatgaagctcacactactttgttcaatggaaaatttgttcttgtctaaatgtccagakagtaacttggttctttttctccagggttatgcagaacagaggagacgcttttctgccagctggaaggggtagcaggtggggtaatggattcccagcttgccagcggctgagattctaattagaatcttccttctggcttttagcaagcagctttcacttcatagtgtccttagagaagaaagttccatattcagcaagaa

SEQ ID NO: 198 - DNA, 401 bp, Homo sapiens
gtagaaggagaaagaaaagagagatatggaggtgagggagggtgaaaatgtgcaatagatgatgacagtgttggagaaggcagaggtttttgccataaagaatctctagctgggatcacttgaggccaggagtttgagaccagcttgggcaacaaagtaagaccccagctctataaataaataaataagtaaataaataartaaataaataaataaataaataaatcagctgggcatggtggtgtgcatctgtagtcccaactactcaggaggctgaggcagaaggatcccttgagcctaggagttcaaggctgcagtgagctatgatgtgccactgcactccagcctggggaacagagcaagatcctgtcttttaaagaggaagagagagagactgactc

SEQ ID NO: 199 - DNA, 401 bp, Homo sapiens
ttttgagattgttatttaaatgccgtttgctattaaactgtggttagaaaatctgctcagccaaaatgatgctgaaagagcattaagtttatgagtcacaaaagccagagtaattctaattactttcctgaacttcagtacaatagagatgtttaatatgcaatgggacactcctttaaaattgttgcaagacaggtgatmggagtcttggcttctctccccaccttgattatcagtgaagtaaaggttaggtgcggtattgtattgtgtgttttcatcttaaagtttcttcttctgcagaatgggttaatgatggaaacatttgggtattgtggtgcacagagtgggttctcgtgtctcttcagagcaaagtcctcttatacatcatcatgagcctcata

SEQ ID NO: 200 - DNA, 401 bp, Homo sapiens
tccagcaggacaagatgtggaggcagaaggcagtgctgttgatgatcctgaccttgtatggggttaggctaatgtgtgtgtttgtgtcttagtttttaacaaaaacgtttaaaaagtaaaggaaaaaaaatcttaaaaacagaaaagagcttatagaataaggttataaagaaagaaaatatttttgcacagctgtacggygtgtttatgtgttattacaagagtaaaaaggtttagaaaatttaaaaattgataaagttgaaaagttacagtaaactgagtttaatttgttatttaagaaagaaaaatattttctataaatctagtctagcctaagggtatagtgtttataaagtatacagtagtgtacagtcaagtcctaggctttacattcactcacc

SEQ ID NO: 201 - DNA, 401 bp, Homo sapiens
actcttataggagataacatcttctagaattattcttcatgtatcttatcttctacctccttttgttcatgtctttatcttcttctgctaattctgggataatttgttgagtttatcttctccagcactcattcatttcctgcatatctttcttactgccatcatccagttagtttggcattatgttttttgacctcactsggacctttctaatttaagtcttcctttgtgaatatttcccagctacagagatgccatggcttcttgaacccttctggaagagaatctaatattttctaaaaatttcttctgaattttggagtaaccctattttaaaaggagatattccatcattttttaaaacaatgactcacttattttggacaccactattttctcat

SEQ ID NO: 202 - DNA, 401 bp, Homo sapiens
tcccaatgccattcccaactcttctaaattcatctggggcttaatagactctccccatcccaactcttctaaattcatctggggcttaatagactttccccctcatagacttccatgataagctgctctgtttcacaatagggaagcttacacaggcctttccttcaatctcatcctgccctccctagctaacagaaattyctagaaatatctagccagtgagagcatccatttctagtttcatcctataatgttggttttcataatgttggttttaaatgtaattattcattacaaagtatttgtgagggagtagagaagaatgggtacttataataaaagcatgactttttaatgtatcaaaactatacagaaacaaagacaacatagagataactctt

SEQ ID NO: 203 - DNA, 401 bp, Homo sapiens
tactgtctgattaaaaataatatgacacatgacaggtacaagttacatgagaattcctttgacatgtgaatgaatggttctttgaagacagagtgcagtaaattccagtctataaaagagttttttgaataatatgatgaccaaacttgtgtgtccagggcaaaaggagggtacaaatagacagaatatgcaagatagagwaatgctggagttaagtctcagatatctttgaagcaagagtttcatccttaatttgcttggtgggcatgtgtttcttacatataagatttttatgtttctgaagcccagaggataagatggagaattcagctcagggttggcctaagggagggaggtgaactagcgagaaagaaaaaggtcccataagacaccccaggaag

SEQ ID NO: 204 - DNA, 401 bp, Homo sapiens
tgcaggaagaatctgttggctggttacaattttatattaagggagggtacccaagagaaaattctagcccatttctattgcttcatttttcacattgcatgcagtcagtggtgatgtactttctctctctctttttttagagagagagttcctttttttttttttttagagagttcctcattacttgttttgaacctaaasttataatttagtgtctgtgacagcacatttgattgtttttaaatgaaggtgataggaaaggcagaagaatgactagggaagaaaatctggagaacagatgacaagataacattgcttttgattctctgcaaacaagcatggtattgaaaaatgatccaaaatcgtttgcttgagcaccacagttacttttgagtaatatt

SEQ ID NO: 205 - DNA, 401 bp, Homo sapiens
gaccatcctggctaacacggtgaaaccccgtctctactaaaaatacaaaaattagccgggcatggtggtgggcgcctgtagtcccagctactctggaggctgagacaggagaatggtgcgaacccgggaggtggagcttgcagtgagccgagatcgcgccactgcactccagcctgggcgacagagcgagactcactctcmaaaaaaaaaaaaaaaaaaaaaaaaaaaggaaccaagttgtgagtgagaaggacctggaaaggcactgttagtggcagtggatccgtaggggtctgcaggaacctcaactcttgcgtcctcagaagaattcgacggaggaggcatgaggcagaaggagagacagaggcaagttttatagcagaagtgaaagtttatttaaa

SEQ ID NO: 206 - DNA, 401 bp, Homo sapiens
gaagagggccaagcaggtgacttgagagaccaagtgcgctgtttgaccttgacttacggtttagtatattggcatacttctggggtcttgtgtccctgatttcctgatttttccctggagggtgcgccgtctgtatgcgcagtggcctactagcgtttgggagaggccgtaggcgcagtgtgtttactggagttgtacgcrtgctccctagagtggttcttcccttcccggtctagcattcctaggggaaagtgatgtaccagttaagctctgctgttttgcctcttagtgctcatgcttgagcccactcgcccaattcctgaaatcttagggggaagcggctgatcaccagtttcagatttttcctatgtattgtgagactgcctttccctggcacaggc

SEQ ID NO: 207 - DNA, 401 bp, Homo sapiens
ctgcctcccataatgccagagtggtcaatttttagtatccttactgtgcaaccagctctcatgattgtacccagtcaaatctctataataaattatacatctctctacagacctggactgaaacattgctatttggtgttttaccctatttagagccaaaatatattttcataagaagaaactcacagctgtcacatgtawgtaagttataaactgatttcagaatctccaatacagaaaatagtaactttagtgttcctattgtttggtactctaataataattagagaaaactgagagtttgggattatgtgactacaggaaatacctgtaattgccaattggcttcataataagaaaattggcagggctaagaaggcccagggaattaagaatataaa

SEQ ID NO: 208 - DNA, 401 bp, Homo sapiens
aaggcttctggccccctccaatcccctctgcatctcactaacaggactggaagctgctgaaacagaggtattggaagcccacagatcatcaatatacagtttgaacttgtagtgaggtagacaagaataattcatagggatgtattatagagtaggtagagaaggctgactcctgacagtggcatatttgataaaaatccycccaaaggcatttagtacctggtaggctaatggctcatgagagaaaacacaagaaaggagatgatatgggagggtgggaaagccaatctttaggtaaaaaattacaagtcgtctttaaactatttactttaaaaattactagtttttctgctctgcatgctaatatgctactctttttttctcaactttattatttctct

SEQ ID NO: 209 - DNA, 401 bp, Homo sapiens
aattacaagtcgtctttaaactatttactttaaaaattactagtttttctgctctgcatgctaatatgctactctttttttctcaactttattatttctctttgaatgtatattagtccattcttacattgctataaagaaatatcggagactaggtaatttataaagaaaagaggtttaattgcctcatggtttcatagrctgtttgggtagcatggctggggaggcctcaggaaacttttaatcatggtggaaagtgaaggggaagtagggacgtcttacatgaccagagcaggaggaagagagagaagggggagatggtgcacacttttttttttttaagctttgtatctaatttggcaatcttattccagtatttttctttttctttttttttttat

SEQ ID NO: 210 - DNA, 401 bp, Homo sapiens
acatttgggttggttccaagtcttcgctattgtgaatagtgccgcaataaacatacgtgtgcatgtgtctttatagcagcatgacttctaatcctttgggtatatacccagtaatgggatggctgggtcaaatgatatttctagttctagatccctgaggaatcgccacactgtcttctacaatggttgaactagtttacygtctcaccaacagtgtaaaagtgttcctatttctctacatcatctccagcacctgttgtttcctgactttttaatgatygccattctaactggtgtgagatggtatctsattgtggttttgatttgcatttctcggatggccagtgatgatgagcattttttcatgtgtctgttggctgcataaatgtcttcttttgaga

SEQ ID NO: 211 - DNA, 401 bp, Homo sapiens
catgacttctaatcctttgggtatatacccagtaatgggatggctgggtcaaatgatatttctagttctagatccctgaggaatcgccacactgtcttctacaatggttgaactagtttacygtctcaccaacagtgtaaaagtgttcctatttctctacatcatctccagcacctgttgtttcctgactttttaatgatygccattctaactggtgtgagatggtatctsattgtggttttgatttgcatttctcggatggccagtgatgatgagcattttttcatgtgtctgttggctgcataaatgtcttcttttgagaagtgtctgttcatatccttcgyccactttttgatggggttgtttgtttttttcttgtaaatttgtttgagttctttgta

SEQ ID NO: 212 - DNA, 401 bp, Homo sapiens
agtaatgggatggctgggtcaaatgatatttctagttctagatccctgaggaatcgccacactgtcttctacaatggttgaactagtttacygtctcaccaacagtgtaaaagtgttcctatttctctacatcatctccagcacctgttgtttcctgactttttaatgatygccattctaactggtgtgagatggtatctsattgtggttttgatttgcatttctcggatggccagtgatgatgagcattttttcatgtgtctgttggctgcataaatgtcttcttttgagaagtgtctgttcatatccttcgyccactttttgatggggttgtttgtttttttcttgtaaatttgtttgagttctttgtagattttggatattagccctttgtcagataa

SEQ ID NO: 213 - DNA, 401 bp, Homo sapiens
tgttcctatttctctacatcatctccagcacctgttgtttcctgactttttaatgatygccattctaactggtgtgagatggtatctsattgtggttttgatttgcatttctcggatggccagtgatgatgagcattttttcatgtgtctgttggctgcataaatgtcttcttttgagaagtgtctgttcatatccttcgyccactttttgatggggttgtttgtttttttcttgtaaatttgtttgagttctttgtagattttggatattagccctttgtcagataagtagattgcaaaaattttctcccattctgtaggttgtctgttcactctgatggtagtttcttttgccgtgcagaagccctttagtttaattagatctcatttgtcaattttgg

SEQ ID NO: 214 - DNA, 401 bp, Homo sapiens
tgtagattttggatattagccctttgtcagataagtagattgcaaaaattttctcccattctgtaggttgtctgttcactctgatggtagtttcttttgccgtgcagaagccctttagtttaattagatctcatttgtcaattttggcttttgttgccattgcttttggtgttttagacatgaagtccttgaccatgcctrtgtcctgaatggtattgcctaggttttctcctagggtttttatggttttaggtctaacatgtaagtctttaatccatcttgaattaatttttgtgtaaggtataaggaagggatccagtttcagctttctacatatggctagccagttttcccagcaccatttgttaaatagggaattgtttccccatttcttgtttttg

SEQ ID NO: 215 - DNA, 401 bp, Homo sapiens
tttgtgtaaggtataaggaagggatccagtttcagctttctacatatggctagccagttttcccagcaccatttgttaaatagggaattgtttccccatttcttgtttttgtcaggattgtcaaagatcagatggttgtagatgtgtggtattatttctgagggctctgttctgttccattggtgtatatctctgttttgktaccastacyatgctgttttggttactgtagccttgtagtatagtttgaagtcaggtagtgtgatgcctccagctttgttcttttggcttaggattgtcttggcaatgtgagctcttttcagattccatatgaactttaaagtagttttttccaattctgtgaagcaagtcattggtagyttgatggggatgtcattgaa

SEQ ID NO: 216 - DNA, 401 bp, Homo sapiens
taaggtataaggaagggatccagtttcagctttctacatatggctagccagttttcccagcaccatttgttaaatagggaattgtttccccatttcttgtttttgtcaggattgtcaaagatcagatggttgtagatgtgtggtattatttctgagggctctgttctgttccattggtgtatatctctgttttgktaccastacyatgctgttttggttactgtagccttgtagtatagtttgaagtcaggtagtgtgatgcctccagctttgttcttttggcttaggattgtcttggcaatgtgagctcttttcagattccatatgaactttaaagtagttttttccaattctgtgaagcaagtcattggtagyttgatggggatgtcattgaatctata

SEQ ID NO: 217 - DNA, 401 bp, Homo sapiens
gtataaggaagggatccagtttcagctttctacatatggctagccagttttcccagcaccatttgttaaatagggaattgtttccccatttcttgtttttgtcaggattgtcaaagatcagatggttgtagatgtgtggtattatttctgagggctctgttctgttccattggtgtatatctctgttttgktaccastacyatgctgttttggttactgtagccttgtagtatagtttgaagtcaggtagtgtgatgcctccagctttgttcttttggcttaggattgtcttggcaatgtgagctcttttcagattccatatgaactttaaagtagttttttccaattctgtgaagcaagtcattggtagyttgatggggatgtcattgaatctataaatt

SEQ ID NO: 218 - DNA, 401 bp, Homo sapiens
tggtgtatatctctgttttgktaccastacyatgctgttttggttactgtagccttgtagtatagtttgaagtcaggtagtgtgatgcctccagctttgttcttttggcttaggattgtcttggcaatgtgagctcttttcagattccatatgaactttaaagtagttttttccaattctgtgaagcaagtcattggtagyttgatggggatgtcattgaatctataaattaccttgggcagtaaggccattttcatgatattgattcttcctacccatgagcatggaattttcttccattcgtttgtatcctcttttatttcattgagcagtggtttgtagttcttgaagaggtccttcacatcccttgtaaattggattcctaggtattttattctctt

SEQ ID NO: 219 - DNA, 401 bp, Homo sapiens
atatacaatcatgtcatctgcaaacagggacaatttgacttcctcttttcctaactgaataacctttatttctttctcctgcctgttattatgttgaataggagtggtgagggagggcatccctgtgttgtgccagttttcaaagggaatgctttgagtttttgtccattcagtatgatattggctgtgggtttgtcataratagctcttgtttttttgagatacaccccatcaatacctaatttattgaragtttttagcatgaagggctgttgaattttgtcaaagggcttttcttcatctattgagataatcatgtggtttttgtctttggttctgtttgtatgctggattacatttattgatttgcatatgttgaaccatcctcgcatcccaaggat

SEQ ID NO: 220 - DNA, 401 bp, Homo sapiens
ctaactgaataacctttatttctttctcctgcctgttattatgttgaataggagtggtgagggagggcatccctgtgttgtgccagttttcaaagggaatgctttgagtttttgtccattcagtatgatattggctgtgggtttgtcataratagctcttgtttttttgagatacaccccatcaatacctaatttattgaragtttttagcatgaagggctgttgaattttgtcaaagggcttttcttcatctattgagataatcatgtggtttttgtctttggttctgtttgtatgctggattacatttattgatttgcatatgttgaaccatcctcgcatcccaaggatgaagcccaggtgatcatggtggataagctttttgatgtgctgctggatta

SEQ ID NO: 221 - DNA, 401 bp, Homo sapiens
tggacttcttttggttggtaggctattaattattgccttaatttcagagcctgttattgatctattcagggattcaacttcttcctggtttagttttgggagggtgtatgtgtccaggaatttttccatttcttctagattttctagtttatttacatagaagtgtttatagtattctctgatggtagtttgtatttctgygggattggtggtgatatcccctttatcattttttattgagtccatttgattcttctctcttttcttctttattattcttgctagctgtctatcaattttgttgatcttttcaaaaaaccagctgctggattcattgattttttgaagggttttttttgtatctgtatttccttcagttcttctctgatcttagttatttc

SEQ ID NO: 222 - DNA, 401 bp, Homo sapiens
tctttattattcttgctagctgtctatcaattttgttgatcttttcaaaaaaccagctgctggattcattgattttttgaagggttttttttgtatctgtatttccttcagttcttctctgatcttagttatttcttgccgtctgctagcttttgaatgtgtgttctcttgcttctctagttcttttaattgtgatgttasggtgtcaattttagatctttcctgctttctcttgtgggcatttagtgttataaatttccctctacactgctttaaatgtgtcccatttaaaggtgatttggggtggagagttctttagatgtctattaggtccacttggtgcagagctgagttcaactcctggatatccttgttaactttctgtctcgttgatctgtcta

SEQ ID NO: 223 - DNA, 401 bp, Homo sapiens
tttaaaggtgatttggggtggagagttctttagatgtctattaggtccacttggtgcagagctgagttcaactcctggatatccttgttaactttctgtctcgttgatctgtctaatgttgacagtggggtgttaaattctctcattattattgtgtgggagtctaagtctctttgtaggtctctaaggacttgctttatrtatctgggtgctcctgtattgggtgcatatatatttaagatagttagctcttcttgttgaattgatccctttaccattatgtaatgaccttctttgtctcttttgatctttattggtttaaagtctgttttatcagagactaggattgcaacccctgcctttttttgttttccatttgcttggttgatcttcctccatcc

SEQ ID NO: 224 - DNA, 401 bp, Homo sapiens
tagcatcagtggtctttacaatttgtcatgtttttgcagtcgctggtaccagttgttcctttccatgtttagtgcttccttcaggagctcttttagggcaggcctggtggtgacaaaatctctcagcatttgcttctctgtaaagaattctgtttctccttcacttatgaagcttagtttggctggatatgaaattctggkttgaaaattcttttctttaagaatgttgaatattggccccactctcttctggcttctagagtttctgccaagagatctactgttagtctgaagggtttccctttgtgggcaacccgacctttctctctggctgcccttaacattttttccttcatttcaactttggtgaatctgacaattacgtttcttggagttgctct

SEQ ID NO: 225 - DNA, 401 bp, Homo sapiens
gccaagagatctactgttagtctgaagggtttccctttgtgggcaacccgacctttctctctggctgcccttaacattttttccttcatttcaactttggtgaatctgacaattacgtttcttggagttgctcttctcaaggagtatctttgtggcgttctctgtatttcctgaatttgaatgttggcctgccttgctagkttggggaagttctcctggataataccctgcagagtgttttccaacttggttccattctccccatcactttcaggtacaccaatcagatgtagatttggtcttttcacatagtcccatatttcttgaaggctttgtttgtttctttttactcttttttctctagacttctcttctcacttcatttcattcatttgatcctc

SEQ ID NO: 226 - DNA, 401 bp, Homo sapiens
cagttgatcgaatcagctactgaagcttgtgcattcattacatagttctcatgccatgtttttcagctccatcacgtcatttaaggactcctctacattggttattctagttagccattcgtctaatcttttttcaaggtttttagctttttttgcaatgcgttctaacttcctcctttagcttggagaagtttgatcttytgaagccttcttctttcaactcgtcaaagtcattctccatccagctttgttccattgctggtgaggaactgtgttcctttggagagggagaggcgctctgatttttagaattttcagcgtttctgctctgttttttccccatctttgtggttttatctacctttggtctttgatgatggtgacgtacagatggggttttg

SEQ ID NO: 227 - DNA, 401 bp, Homo sapiens
tggtgacgtacagatggggttttggtgtggatgtcctttctgtttcttagttttccttctaacagttagggtcctcagctgcaggtctgttggagtttactggaggtccactccagaccctgtttgcctggatatcagcagtggaggctgcagaacagtgaatattgctgaacagcaaatgttgctgcttgattgttcctytggaagcttcatctcagaggggtacctggctgtgtgaggtgtcagtctgcccctactggggagtgtctcccagttaggctactcagggttcagggacccacttgaggaggcagtctgtctgttctcagatctcaaactccattctgggagaaccactactctcttcaaagctgtcagacagggacatttaagtctgcaga

SEQ ID NO: 228 - DNA, 401 bp, Homo sapiens
actcagggttcagggacccacttgaggaggcagtctgtctgttctcagatctcaaactccattctgggagaaccactactctcttcaaagctgtcagacagggacatttaagtctgcagaggtttctgctgccttttgtttggctgtgccctgcccccagaggtggcatctacagaggcaggcaggcctccttgagctgcrgtgagctccacccagttcgagcttcctggctgctttgtttacctgctcaagcctcagcaatggtgggcgccccacccccagcctcactgyagccttgcagtttgatctcagactgctgtgctagcaatgaagggggctccgtgggcatgggaccctctgagccatgtgtgggatataatctcctggtgtgccgtttgcta

SEQ ID NO: 229 - DNA, 400 bp, Homo sapiens
ctgtcagacagggacatttaagtctgcagaggtttctgctgccttttgtttggctgtgccctgcccccagaggtggcatctacagaggcaggcaggcctccttgagctgcrgtgagctccacccagttcgagcttcctggctgctttgtttacctgctcaagcctcagcaatggtgggcgccccacccccagcctcactgyagccttgcagtttgatctcagactgctgtgctagcaatgaagggggctccgtgggcatgggaccctctgagccatgtgtgggatataatctcctggtgtgccgtttgctaagaccgttggaaaagggcaatattagtgagaggtgacagcatgctggcagccctcacagccctcgctygctctcagcacctcctctgcc

SEQ ID NO: 230 - DNA, 401 bp, Homo sapiens
cgccccacccccagcctcactgyagccttgcagtttgatctcagactgctgtgctagcaatgaagggggctccgtgggcatgggaccctctgagccatgtgtgggatataatctcctggtgtgccgtttgctaagaccgttggaaaagggcaatattagtgagaggtgacagcatgctggcagccctcacagccctcgctygctctcagcacctcctctgcckgggctcccactttggcagcacttgaggagcccttcagcccaccgctgcactgtgggagcccctttctgggctggccaaggctggagccggctccctcagcttgcagggaggtgtggaaggagaggtgcgagcggcaaccagggctgcacagggtgcttacgggccagctggagttctg

SEQ ID NO: 231 - DNA, 401 bp, Homo sapiens
yagccttgcagtttgatctcagactgctgtgctagcaatgaagggggctccgtgggcatgggaccctctgagccatgtgtgggatataatctcctggtgtgccgtttgctaagaccgttggaaaagggcaatattagtgagaggtgacagcatgctggcagccctcacagccctcgctygctctcagcacctcctctgcckgggctcccactttggcagcacttgaggagcccttcagcccaccgctgcactgtgggagcccctttctgggctggccaaggctggagccggctccctcagcttgcagggaggtgtggaaggagaggtgcgagcggcaaccagggctgcacagggtgcttacgggccagctggagttctgggtgggcatgggcttggtgggc

SEQ ID NO: 232 - DNA, 401 bp, Homo sapiens
ccctgccagagggccctctcagagtggccacctggccctgccagccctggggaatgaggagcttagcacccggaccagcggctgcgcagggtgtgctgggtcccccagcagtgccagcccaccagtgctgtgctcgatttctctccaggccttagctgccttcctgtggggcagggctcgggacctgcagcccgccatgcytgagtcccgcccccacccccacgggstcctgtgcagcctgagcctccccgacgagcgctgcccactgctccatggtgcccagtcccatcgaccacccaagggctgaggagtgtgggcgcacagcacaggactggcaggcagctccaccagcagccccagtgcgagatccactgggtgaggccagctgggctcctgtgtct

SEQ ID NO: 233 - DNA, 401 bp, Homo sapiens
gccacctggccctgccagccctggggaatgaggagcttagcacccggaccagcggctgcgcagggtgtgctgggtcccccagcagtgccagcccaccagtgctgtgctcgatttctctccaggccttagctgccttcctgtggggcagggctcgggacctgcagcccgccatgcytgagtcccgcccccacccccacgggstcctgtgcagcctgagcctccccgacgagcgctgcccactgctccatggtgcccagtcccatcgaccacccaagggctgaggagtgtgggcgcacagcacaggactggcaggcagctccaccagcagccccagtgcgagatccactgggtgaggccagctgggctcctgtgtctagtgggaacttggaraacctttatgt

SEQ ID NO: 234 - DNA, 401 bp, Homo sapiens
acccccacgggstcctgtgcagcctgagcctccccgacgagcgctgcccactgctccatggtgcccagtcccatcgaccacccaagggctgaggagtgtgggcgcacagcacaggactggcaggcagctccaccagcagccccagtgcgagatccactgggtgaggccagctgggctcctgtgtctagtgggaacttggaraacctttatgtctagctaagggattgtaaatacaccaatcagcactctgtctctagctcaaggtttgtaaacacaccaatcagcaccctgtgtctagctcaggttttgtgaatacaccaatcgacactctgtgtctagctactctggtggggacttggaaaacttttatgtctagctaagagattgtaaataacaccaat

SEQ ID NO: 235 - DNA, 401 bp, Homo sapiens
caccaatcgacactctgtatctagctactctggtggggacttggagaacctttgtgtccagctcagggattttaaacacaccaatcagcaccctgtcaaaacagaccactcggctctctgtaaaatggaccaatcagcaggatgtgggtggggccagataagagaataaaagcaggctgcccgagccagcagtggcaaccrgctggggtccccttccacactgtggaarctttgttctttcgctctttgaaataaatcttgctgctgctcaatctttgggtacacactgcctttatgagctgtaacactcactgtgaaggtctgcagcttcactcctgaagccagcaagaccatgaacccaccgggaggaatgaacaactccagacgcgccaccttaagac

SEQ ID NO: 236 - DNA, 401 bp, Homo sapiens
tctggtggggacttggagaacctttgtgtccagctcagggattttaaacacaccaatcagcaccctgtcaaaacagaccactcggctctctgtaaaatggaccaatcagcaggatgtgggtggggccagataagagaataaaagcaggctgcccgagccagcagtggcaaccrgctggggtccccttccacactgtggaarctttgttctttcgctctttgaaataaatcttgctgctgctcaatctttgggtacacactgcctttatgagctgtaacactcactgtgaaggtctgcagcttcactcctgaagccagcaagaccatgaacccaccgggaggaatgaacaactccagacgcgccaccttaagacccgtaacactcaccgcaaaggtctgcag

SEQ ID NO: 237 - DNA, 401 bp, Homo sapiens
cccgattttccaggtgctgtctgtcacccttttccttggctaggaaagggaattccctgaccccttgtgcttcccgggtgaggcaatgcctcgccctgctttggctcacacttggtgtgctgcacccactgttctgcccccactgactgacgagccccagtgagatgaacccagcaccttagttggaaatgcagaaatcaycygtcttctgcgttgctcacactgggagctgtagactggagctgtttytatttggccatcttggaaccaccttcccaatagtacacatttttaaacaaccagatctcatgagaactcactcactatcatgagaacagcaagggggaaatcagcccccatgatctagtcacctcccaacaggtccctcctccaacattggg

SEQ ID NO: 238 - DNA, 401 bp, Homo sapiens
cgattttccaggtgctgtctgtcacccttttccttggctaggaaagggaattccctgaccccttgtgcttcccgggtgaggcaatgcctcgccctgctttggctcacacttggtgtgctgcacccactgttctgcccccactgactgacgagccccagtgagatgaacccagcaccttagttggaaatgcagaaatcaycygtcttctgcgttgctcacactgggagctgtagactggagctgtttytatttggccatcttggaaccaccttcccaatagtacacatttttaaacaaccagatctcatgagaactcactcactatcatgagaacagcaagggggaaatcagcccccatgatctagtcacctcccaacaggtccctcctccaacattgggga

SEQ ID NO: 239 - DNA, 401 bp, Homo sapiens
ggaattccctgaccccttgtgcttcccgggtgaggcaatgcctcgccctgctttggctcacacttggtgtgctgcacccactgttctgcccccactgactgacgagccccagtgagatgaacccagcaccttagttggaaatgcagaaatcaycygtcttctgcgttgctcacactgggagctgtagactggagctgtttytatttggccatcttggaaccaccttcccaatagtacacatttttaaacaaccagatctcatgagaactcactcactatcatgagaacagcaagggggaaatcagcccccatgatctagtcacctcccaacaggtccctcctccaacattggggattataatttgacatgaaatattggtggggacacaaatccaaaccat

SEQ ID NO: 240 - DNA, 401 bp, Homo sapiens
ttagagtttttattttattaaaggctttaattggtaatactcatttctttttcttttattagcattgattttactttctgtagaaatacagaaagcattttcaaatgctaattttattatgtctgtatctggtagaagattcaaaacattgctccaaaaacacttggcagcaaattccccattcactggcaacctgaaatrtaagtttattgagcatgaatgataattcgttatcagatgtaagtcttggctctaattacaagatgcttgtagtccaacatgtagtctaacaccttatactctgatcaagtataagaaagaggccaatttactagtagaaattgcaacaatgaataggaaaaaaaatgtacgctgcaaagcagagcactgtgagagaagaa

SEQ ID NO: 241 - DNA, 401 bp, Homo sapiens
atagttctgtatagggaagtgtgaatgctgtacatagcatgtgactagcttgcatttaatggggaaaagaatttaactagataattagtatatatcaaatgcaatttatgtgtcagacatcatgctatttatgtattttacacaattattatcaaaatgtaatacattaccaatgactagaaataatagttgaagaataakaatagtttcataaaaagtgtaggataattgaatcagagagagacattcagagaagaaaaacgttatgaaaaattttaagtagtagtttgaaggaagaaaaaagagttttccaaaaagaaaatgtctggaaatataaagyaattcaaaatttgagaagcagaggttttgctttagtaaggagagggtaaatagatatggct

SEQ ID NO: 242 - DNA, 401 bp, Homo sapiens
acacaattattatcaaaatgtaatacattaccaatgactagaaataatagttgaagaataakaatagtttcataaaaagtgtaggataattgaatcagagagagacattcagagaagaaaaacgttatgaaaaattttaagtagtagtttgaaggaagaaaaaagagttttccaaaaagaaaatgtctggaaatataaagyaattcaaaatttgagaagcagaggttttgctttagtaaggagagggtaaatagatatggctggtagagtgtaractgtgaccagagcagcgattctcttggcttataagaggaaactgctgggtaatcccaaagggccttgaattgttgatgaaatgtaagttctttgtggagttaattttggtcaaacattgaccaaaa

SEQ ID NO: 243 - DNA, 401 bp, Homo sapiens
aaaaagtgtaggataattgaatcagagagagacattcagagaagaaaaacgttatgaaaaattttaagtagtagtttgaaggaagaaaaaagagttttccaaaaagaaaatgtctggaaatataaagyaattcaaaatttgagaagcagaggttttgctttagtaaggagagggtaaatagatatggctggtagagtgtaractgtgaccagagcagcgattctcttggcttataagaggaaactgctgggtaatcccaaagggccttgaattgttgatgaaatgtaagttctttgtggagttaattttggtcaaacattgaccaaaatgtttataaatttccttttttcgtggtaaaataaaattgtcttatgattgcttcttgagtgaatttttaagga

SEQ ID NO: 244 - DNA, 401 bp, Homo sapiens
gagtgaatttttaaggatattaaaagttggtattccttaaaagttaaccttttacggttaataaactattgctatagtttattatggtctttgattcatttttctactaggttacttgagactgctacacaacatcaaaaaaattctaatgcacatgggcacaggtttattgtttgaattcccataaaaatttaaaacatsactgaaatggcaaagttgatttaacattaaatgtaacatatcacattaaaaatagaagatactaaagaaaaaatatacaaatattgtagtagatggaggaaaacttctctatgcattratgataaaaattatcaggaagttcagagtagaaggaaaagttttcaacctgaaaaaccatttttactaaaagcctacagcaa

SEQ ID NO: 245 - DNA, 401 bp, Homo sapiens
agactgctacacaacatcaaaaaaattctaatgcacatgggcacaggtttattgtttgaattcccataaaaatttaaaacatsactgaaatggcaaagttgatttaacattaaatgtaacatatcacattaaaaatagaagatactaaagaaaaaatatacaaatattgtagtagatggaggaaaacttctctatgcattratgataaaaattatcaggaagttcagagtagaaggaaaagttttcaacctgaaaaaccatttttactaaaagcctacagcaaacatcatgcttgaagattaaatagtagaaacactccttttaaaatgaaacatgacagacatgcatatgtttttattttttgcttttttctctctttttcttgctctcccagtcttcct

SEQ ID NO: 246 - DNA, 401 bp, Homo sapiens
acaatagcataaaggtccaaattctttccaaattgatatatagtctaatgcaatttaataaaaatcccaaacactaatttttatgagattagacaagctgattctaatatatacatggaagaacaaacggccaagaatagccaacatatgcttaaagaaacaaaatcaaggggcttataataatgctgctataattaagartggatgattatgtagatcaatggaatagaacagaaagttcagaaattgacatgttaatttagggaaattaaatattttgaaaaggtagcattgaatattagtgagcaaataattcttttattaagtcacctggtacaatgattatttatatagaaaatttataattggatctctacttcacatcatatatgaaattcaat

SEQ ID NO: 247 - DNA, 401 bp, Homo sapiens
ttataaaaaagtaacagctttgagatataattcatataccatcatacatttcctttaaaatgtataatttaatggtttttagtatatttacaattatgtaactgatagactctttgtgttccttagctcagctaggtctgagttcttgtcaaatgaccaggaagaattaggcacgtggacaccagagagtgagtggagtarrattaattaagcgaaatgaaaactctcagtggagagtgtatgtggggaagggggtggttcccctacctgaaggtgggaaggccccccaacctgccgccccatgtggctgggtctggggtcttttatggactcagaatggagagtgcatgctgattggtttgtgagtatgcaaaaaaggttaaaacaaagacaccactcag

SEQ ID NO: 248 - DNA, 401 bp, Homo sapiens
tataaaaaagtaacagctttgagatataattcatataccatcatacatttcctttaaaatgtataatttaatggtttttagtatatttacaattatgtaactgatagactctttgtgttccttagctcagctaggtctgagttcttgtcaaatgaccaggaagaattaggcacgtggacaccagagagtgagtggagtarrattaattaagcgaaatgaaaactctcagtggagagtgtatgtggggaagggggtggttcccctacctgaaggtgggaaggccccccaacctgccgccccatgtggctgggtctggggtcttttatggactcagaatggagagtgcatgctgattggtttgtgagtatgcaaaaaaggttaaaacaaagacaccactcaga

SEQ ID NO: 249 - DNA, 401 bp, Homo sapiens
ttgctgaataatattccattgtatggatataacacgtttcttttccattcatcacttgatatttaatggtttccactttttgtctgttaggaacagtgctgtaatatacattcatgtaccaagtttttatgtggacatatattaataatttcatttctgctgggtatgtaactaggagtagaattgctgcatcataaagtwattctatatttaatctgagggactgttagacctgttttccagagtgatgatacyattttatattcccacaagtgtccycatggatacttgttattatctgtttcttaaattatggccatcctagtagatgtgaagtggtatctcattgtgattttctttggcatttctctagtgtctaaggatgatgagaaagttttcat

SEQ ID NO: 250 - DNA, 401 bp, Homo sapiens
cttgatatttaatggtttccactttttgtctgttaggaacagtgctgtaatatacattcatgtaccaagtttttatgtggacatatattaataatttcatttctgctgggtatgtaactaggagtagaattgctgcatcataaagtwattctatatttaatctgagggactgttagacctgttttccagagtgatgatacyattttatattcccacaagtgtccycatggatacttgttattatctgtttcttaaattatggccatcctagtagatgtgaagtggtatctcattgtgattttctttggcatttctctagtgtctaaggatgatgagaaagttttcatgagtttaatggccatttgaatattgtctttggtgaaatatacattggttttaaa

SEQ ID NO: 251 - DNA, 401 bp, Homo sapiens
tttgtctgttaggaacagtgctgtaatatacattcatgtaccaagtttttatgtggacatatattaataatttcatttctgctgggtatgtaactaggagtagaattgctgcatcataaagtwattctatatttaatctgagggactgttagacctgttttccagagtgatgatacyattttatattcccacaagtgtccycatggatacttgttattatctgtttcttaaattatggccatcctagtagatgtgaagtggtatctcattgtgattttctttggcatttctctagtgtctaaggatgatgagaaagttttcatgagtttaatggccatttgaatattgtctttggtgaaatatacattggttttaaataaacattgcttcataataacaca

SEQ ID NO: 252 - DNA, 401 bp, Homo sapiens
aagtggtatctcattgtgattttctttggcatttctctagtgtctaaggatgatgagaaagttttcatgagtttaatggccatttgaatattgtctttggtgaaatatacattggttttaaataaacattgcttcataataacacaactttaaagataaacagaatgaggagaaaatagaaaaaaagttaatgtagataaytctttagataagctttgctgtgaatagaagcagtgaaaggagataattcaaaggacatgtgagttgaagaaaggcttgcaaatgttccggttcagcaatttcttttatgccacagtgataatagtagcccacagtcacagtctcagtgggcacagagtgagggaggcaaagtgagggacagaaatggggaaggaagagga

SEQ ID NO: 253 - DNA, 401 bp, Homo sapiens
gggcagaagaaaagcactcaggccattggataggcagactttttcccttgagaatccatgactcttgtcaccctttgcttccctctctacccagggactttactgctttacaacctaaggaaccagctaaaacaacagcaacaacgataacaacaaacccaattctcacccgccgcacctgcccccaccacccgcaaaaarcaaatccaaacaaaaaactatttaaaaatcacacaattcacaaaaagcgtctcaagagtatgttaatgtaaataccatttgtattaaacccttaccttatttaaacgtacacatagrgcttgactttaagaaacccatgcatgaattatttgaataactgaactaatgaagggtgaaattaaaataaatatattcaaata

SEQ ID NO: 254 - DNA, 401 bp, Homo sapiens
aggaaccagctaaaacaacagcaacaacgataacaacaaacccaattctcacccgccgcacctgcccccaccacccgcaaaaarcaaatccaaacaaaaaactatttaaaaatcacacaattcacaaaaagcgtctcaagagtatgttaatgtaaataccatttgtattaaacccttaccttatttaaacgtacacatagrgcttgactttaagaaacccatgcatgaattatttgaataactgaactaatgaagggtgaaattaaaataaatatattcaaataatgagaggyggtataagtgaagggaaatatggtttaaattctgagtcttataaaaataatatgtatgtacatgtagtacaactattaaaatttgggctattcttgtttcttaatatt

SEQ ID NO: 255 - DNA, 401 bp, Homo sapiens
aacaaaaaactatttaaaaatcacacaattcacaaaaagcgtctcaagagtatgttaatgtaaataccatttgtattaaacccttaccttatttaaacgtacacatagrgcttgactttaagaaacccatgcatgaattatttgaataactgaactaatgaagggtgaaattaaaataaatatattcaaataatgagaggyggtataagtgaagggaaatatggtttaaattctgagtcttataaaaataatatgtatgtacatgtagtacaactattaaaatttgggctattcttgtttcttaatatttttgtgtataatgataaaaaacaataaaagaaataaagctatttgatttggatgtacagagaaaaatccaagctatgggaagtacattgtga

SEQ ID NO: 256 - DNA, 401 bp, Homo sapiens
agctattgccttaattttagccccacccatgtacactctgtgacgctgcctgggattctacaaatcacatttatcttttgccactaagctccctgttaggatctgccaatcagaggacgctaggggcggactggaaggctgagtggggaagaaggaagacacttcctgtttgcttcctgttctgtttaacgacaccctaasgattacttttcatttcagcagttatagtttgtttcagtagcaacagttatttccagttttagttttgacagcattcctagaactagctccttagggttttttaaagacaccaacgccaaccagcaagcgccccctactgagcggtctaggtcccagctctgagaagccactcaagtttctaagtttagtatttatattat

SEQ ID NO: 257 - DNA, 401 bp, Homo sapiens
atatgtatatatagatatgtgtctctatatcaatgtatgtattatagatatatacatatatgtatatatagaaccatagataattctccttaatatgcatgtacatagatatgtacatccatattatatgatatagaatatataaatataatatctaatatatgcatattaaggagaattatctatggttctaaatatgcrttatacatatctatatgcatactgtatatcatataatacatatccatgtacatgcatattaaggagaactatttacggtttttggtctcatttgtaatgctcataaaaattttctcttttaattttaatttcattgaaaccatccttggactcatacttggagacaaacttacttggtcactatatattattattttgac

SEQ ID NO: 258 - DNA, 401 bp, Homo sapiens
aataatttgtataaattggaattatttgtttcttaaaggtttatggaacatctaaagaacaaattcatctggctctcatacagtttttaggatactactttgattgacatttcagtttcttttagatctatatcttctatttttcttgaggctattttgataattatttcttaagatattatcaattttcatctagataawaaaatatatcattttatgtatttttaaattcatcgatatttccacttttcattgacaacattattaagttttattgtgtctcttttttcaaattatacttgatgaaattttgaaaatgattggtctttccaaaaatcacctttaggttttattgataaactttttcttattttctaagtcaggatacaaaatcagtgtac

SEQ ID NO: 259 - DNA, 401 bp, Homo sapiens
aaaaactactttaaagttcatatggaaccaaaaaagagcccgcatcaccaaggcaatcctaagccaaaagaacaaagctggaggcatcacactacctgacttcaaactatactacaaggctgtagtaaccaaaacagcatggtactggtaccaaaacagagatatagaccaatggaacagaacagagccctcagaaataaygccgcatatctacaactatctgatctttgacaaacctgagaaaaacaagcaatggggaaaggattccctatttaataaatggtgctgggaaaactggctagccatatgtagaaagctgaaactggatcccttccttacaccttatacaaaaatcaattcaagatggattaaagacttaaacgttagacctaaaaccataa

SEQ ID NO: 260 - DNA, 401 bp, Homo sapiens
tggatcccttccttacaccttatacaaaaatcaattcaagatggattaaagacttaaacgttagacctaaaaccataaaaaccctagaagaaaacctaggcatcaccattcaggacataggcatgggcaaggacttcatgtccaaaacaccaaaaggaatggcaacaaaagccaaaattgaccactgggatctaattaaaytaaagagctgcacagcaaaagaaactaccatcagagtgaacaggcaacctacaaaatgggagaaaattttcgcaacctactcatctgacaaagggctaatatccagaatctacaatgaactcaaacaaatttacaagaaaaaaamaaacaaccccatcaaaaagtgggcgaaggacatgaacagacacctatcaaaagaa

SEQ ID NO: 261 - DNA, 401 bp, Homo sapiens
aacaccaaaaggaatggcaacaaaagccaaaattgaccactgggatctaattaaaytaaagagctgcacagcaaaagaaactaccatcagagtgaacaggcaacctacaaaatgggagaaaattttcgcaacctactcatctgacaaagggctaatatccagaatctacaatgaactcaaacaaatttacaagaaaaaaamaaacaaccccatcaaaaagtgggcgaaggacatgaacagacacctatcaaaagaagacatttatgcagccaaaaaacacatgaaaaaatgctcatcatcactggccatccgagaaatgcaaatcaaaaccacaatcagataccatctcacaccagttagaatggcaatcattaaaaagtcaggaaacaacaggtgctgga

SEQ ID NO: 262 - DNA, 401 bp, Homo sapiens
ttcttttaaaaaatcttcaataattctaccctaattttctgagcattttcttagccatctgaaagcttagttcaacaattttcaatgttttgttttttaatactaccttggcataacactgagggtatatccttattttctcattctcacactctcaatagttctatgtagtttgtaattttcattttgctgttcccttgwcctaaaagtaattttgaatgcgaagagcacttttcagtcacttaatttttaaaataaattttattgtgtacatttaaagtatacagcattatgttatggaatacacataggtagtaaaaatttattatggtgaagaaaattaacatatacataatctcatataggaagaaaaaactttgtgtgtggaaagagcagctaaa

SEQ ID NO: 263 - DNA, 401 bp, Homo sapiens
ttttttttatttacttttaatttttgtgggtatacagtaagtgtatatatttatggggtacatgaggtgttttcatacaggcatgtaatatcaaataagcacatcgtggagaatgggatatccaccccctcaagcatttattcttggagttacaaacaatccatttctattctttcagttattttaaaatgtacaaataarttgttattgattatagtctccctgttrtgctatctactaattaatagtagttcttattcataccttctattwttttttgtgcccattaaacatccctacctcccccaccaccaacatcccactatccttcctggcttctggtaaccatccttctactctctctgtccatgagtttaatagttttaatttttagatcccac

SEQ ID NO: 264 - DNA, 401 bp, Homo sapiens
gggtatacagtaagtgtatatatttatggggtacatgaggtgttttcatacaggcatgtaatatcaaataagcacatcgtggagaatgggatatccaccccctcaagcatttattcttggagttacaaacaatccatttctattctttcagttattttaaaatgtacaaataarttgttattgattatagtctccctgttrtgctatctactaattaatagtagttcttattcataccttctattwttttttgtgcccattaaacatccctacctcccccaccaccaacatcccactatccttcctggcttctggtaaccatccttctactctctctgtccatgagtttaatagttttaatttttagatcccacaataagtgagaacatgtgatgtttgtc

SEQ ID NO: 265 - DNA, 401 bp, Homo sapiens
tcatacaggcatgtaatatcaaataagcacatcgtggagaatgggatatccaccccctcaagcatttattcttggagttacaaacaatccatttctattctttcagttattttaaaatgtacaaataarttgttattgattatagtctccctgttrtgctatctactaattaatagtagttcttattcataccttctattwttttttgtgcccattaaacatccctacctcccccaccaccaacatcccactatccttcctggcttctggtaaccatccttctactctctctgtccatgagtttaatagttttaatttttagatcccacaataagtgagaacatgtgatgtttgtctttctgtgcctagttcatttcactccacatgatctccagttccat

SEQ ID NO: 266 - DNA, 401 bp, Homo sapiens
ccactgaaaagtctgctgctaggcatattggctctccattgtatgttatttgtttcatttttcttgctgcttttaggatccctgctttatccttgatctctggcagattgattattaaatacttgccattttgagtctattttctagatcctgtaggtgtgcttcattgttttttattatttttatttttttttctcttgyctcctctgtgtatcaaatagcttgtcttcaggctcacacgttctttcttttggttgattaattttgctattaaagkactctgctgtatttttcattatgccaattgcatttttcagcttcagaatttctgcttgattctttttaattatttcaatctctgttaaatttatctgataagattctgaattccttctctgtgt

SEQ ID NO: 267 - DNA, 401 bp, Homo sapiens
gatccctgctttatccttgatctctggcagattgattattaaatacttgccattttgagtctattttctagatcctgtaggtgtgcttcattgttttttattatttttatttttttttctcttgyctcctctgtgtatcaaatagcttgtcttcaggctcacacgttctttcttttggttgattaattttgctattaaagkactctgctgtatttttcattatgccaattgcatttttcagcttcagaatttctgcttgattctttttaattatttcaatctctgttaaatttatctgataagattctgaattccttctctgtgttatcttgagtttctttgagtttccataacacagcggttttgaattccttgtctgaaatttcacatatctctgtttc

SEQ ID NO: 268 - DNA, 401 bp, Homo sapiens
tattgtagtcttcactgtctaggcttatttgtagccatcctttttgaaaggacttgggtgttgtgatctaagctatatctgctttagcagcaccccaagcccagtaatgctgtggttcttgcagacttgtaaaggatcaccttgatggacttagacaagatccaggagaattttctggattactaggtagagactcttgtyctcttcccttactttctcccaaacaaacagaatctctttctgttctgagtcacctaaagctgggggtggagtgacacaaacacccctgtgaccacctccagtatgactgtgctgagtcagaactgaagccagcacagcactgggtctgcggtaaccactccctggctaatgcctatgttcatataaggccctgaggctct

SEQ ID NO: 269 - DNA, 401 bp, Homo sapiens
tttttcagggacgaaaagctcttcagttagcagaagatgaatgctgccaggattggatcctttctctcaaggttatgggttcttttatgacccaaggtgtgtctaaaatgttcatgtgggaggtagggcccagaacaggggccttttgactctgaccactgccctatcctgctatggctgagctggtatccaagatccaakacaaagtcctcccaacttttccctctcctcttctgaagtggaagaaagggatttcttttcgagctgtgagctgtgaagcctgggggtaggggaggggtgatgccggcactcctttatccacctcagctggtgtctcagtatgtcatgtgccccccccccccccccccagtccactgtttcaggacctggttcagcactgg

SEQ ID NO: 270 - DNA, 401 bp, Homo sapiens
ctggttcagcactgggactcacctaattgttgcagaccttatggactacattggctttcaagtttgtttggagacacagagcactttggtcactggtagtgaggtttgcaggaactcaagttctgacctctgggatccatgatccctctctgagtagtgccggtttaaatgcttccctcgtgggcaggtgtcagctgagtytggtccggtttccctttctgctccacctggatagcacaaaatttaatgtctcacagttgctatgttctctctcctctagcacccagagatgctctctgcaccatgccatgacttccagggggtggagaacaggtaatgtcaggggttcagggctcttttttctatctcttcagttgcctctttcagtgatatgaagttaa

SEQ ID NO: 271 - DNA, 401 bp, Homo sapiens
acaggtaatgtcaggggttcagggctcttttttctatctcttcagttgcctctttcagtgatatgaagttaaaaccaggtactatgagtgctcatctgatttttggttcttatgaagctgtttttttttttttttttttctgtgtagatagttgttaaattggtatctttgtggagaaggcaatcagtggagccttctgtkcggccatcttgctccttatacctgctactttgtattctctgatctatgtctcttcatttctccactcctctgttccaaccacccctggtaaccatgtttgtcttctctatttctgtatatttatttacttattttagaatctacttataaatgagatcatgcagtatttttctttctgtgtctggtttatttcacttgtc

SEQ ID NO: 272 - DNA, 401 bp, Homo sapiens
caagatctcattcttttttaaggctgaagaatatcccattgtatatatgtactacagtttctttatccattcatccatcaatggccacttaggttaggttgtttccatatcttggctattgtagaaaatactgcaatgaatatggaagtgggttatctttatgaggtgttgatttcatttcctttgggtatgcccagaagmgatattactgggacatgtgggagttctatttttaacttctttagaaaccaccatactcttttctataatggccacaccaatgtacattcccactaacagtgtatacaagttcccttttcttcatactcttactgacatttgttatcttcagttacttaatttttattggtgggaagggggctttattaacatttttttgt

SEQ ID NO: 273 - DNA, 401 bp, Homo sapiens
gtctaatccaccgttggtgggcacctaggttgattccacttctttgctattgtgaatagtgctgcaatgaacatatgactacatgtgtcttttgggtagaataatttattttcttttggatatatacccagtaatgggaatgttgggttgactggtagttctgttttaagttctttgagaaatctccaaactgctttccayggtgggtgaactaatttacattcctaccaacagggtataacattcccttttctcaacagcctcaccagcctttgttgtttttgacttttcaataatggtcataatgactggtgtgagatggtatctcattgtggttttgatttcatttatttgatgattattgatggtgagcatatttttatgtttgttggctgcttgta

SEQ ID NO: 274 - DNA, 401 bp, Homo sapiens
cattgaatctacagtttgggcagtattgccatttgaatgacagtgattcttctaatacataagcatgaaatgttttttcatttgtttgtgtcatccatgatttctttcagcagtgttttgtagttctctttgtagagatcttttacctccttggttagaggtattcgtaggtatttcatggtttttgcagcagttgtaaaygggattgctttcttggttttgctctcagtttgagtgttattagtatgtggaaatgaaactgatttttgtacattgattttgtatcctgaaactttattgaaattgtttattttatatatatatatattattatactttaagttctagggtacatgtgcacaacgtgcaggtttgttacatatgtatacatgtgccatgtt

SEQ ID NO: 275 - DNA, 401 bp, Homo sapiens
gagtgttattagtatgtggaaatgaaactgatttttgtacattgattttgtatcctgaaactttattgaaattgtttattttatatatatatatattattatactttaagttctagggtacatgtgcacaacgtgcaggtttgttacatatgtatacatgtgccatgttggtgtgctgcacccattaacttgtcatttatwttaggtatatcccctaatgctgtccctccccacttccccaccccacaacaggctccagtgtgtgatgttccccttcctgtgtccaagtgttctcattgttcaattcccacctawgagtgagaatatgcggtgtttggttttttatccttgcgatagtttgctgagaatgatggtttccagcttcgtccaagtccctacaa

SEQ ID NO: 276 - DNA, 401 bp, Homo sapiens
agggtacatgtgcacaacgtgcaggtttgttacatatgtatacatgtgccatgttggtgtgctgcacccattaacttgtcatttatwttaggtatatcccctaatgctgtccctccccacttccccaccccacaacaggctccagtgtgtgatgttccccttcctgtgtccaagtgttctcattgttcaattcccacctawgagtgagaatatgcggtgtttggttttttatccttgcgatagtttgctgagaatgatggtttccagcttcgtccaagtccctacaaaggacatgaactcatcatttttcacggctgcatagtattccatagtgtatatgtgccacgttttcttaatccagtctatcattgatggacatttgggttggttccaagtctttg

SEQ ID NO: 277 - DNA, 401 bp, Homo sapiens
tatttctagttctagatccctgaggaatcaccacactgtcttccacaatggttgaactagtttacagtcccaccaacaatgtaaaagtgttcctatttctccacatcctctccagcacctgttgtttcctgactttttaatgatcgccattctaactggtgtgagatggtatctcattgtggttttgatttgcatttctcrgatggccagtgatgatgagcattttttcatgtgtctgttggctgcataaaggtcttcttttgagaagtatctgttcatatcctttgcccacttgttgatagggctgtttttttcttgtaaatttgtttgagttctttgcagattctggatattagctctttgtcagatgagtagattgcaaaaattttctcccattctgt

SEQ ID NO: 278 - DNA, 401 bp, Homo sapiens
gtcaggattgtcaaagatcagatggttgtagatgtgtggtattatttctgagggctctgttctgttccattggtctatatctctgttttgttaccactacctgctgttttggttactgtagccttgtagtatagtttgaagtcagataacatgatgtctccagctttgttctttttgtttaggattgtcttggcaatgtgrgcccttttttggttccatatgaacttgaaagtagttttttacaattctgtgaagcaagtcattggtagcttgatagggatggcactgaatctataaattaccttgggcagtatggccattttcatgatatcgattcttcctatccatgagcatggaatgttcttccatttgtttgtatcctcttttatttcattgagcag

SEQ ID NO: 279 - DNA, 401 bp, Homo sapiens
tcatgatatcgattcttcctatccatgagcatggaatgttcttccatttgtttgtatcctcttttatttcattgagcagtggtttgtagttctccttgaagaggtccttcacatctcttataagttggattcctaggtattttattctctttgaagcaattgtgaatgggagttcactcatgatttggctctctgtttgtstgttattggtgtataggaatgcttgtgatttttgtacatttattttatgtcctgagactttgctgaagttgcttatcagcttagggagattttgggctgagacgatggggttttctaaatatacaatcatgtcatctgcaarcagggacaatttgacttcctcatttcctaattgaataccctttatttctttctcctgc

SEQ ID NO: 280 - DNA, 401 bp, Homo sapiens
tattctctttgaagcaattgtgaatgggagttcactcatgatttggctctctgtttgtstgttattggtgtataggaatgcttgtgatttttgtacatttattttatgtcctgagactttgctgaagttgcttatcagcttagggagattttgggctgagacgatggggttttctaaatatacaatcatgtcatctgcaarcagggacaatttgacttcctcatttcctaattgaataccctttatttctttctcctgcctgattgtctctgaagatagaccaatagcaggctctgaaattgaggtaataattaatagcttacctaccaaaaawagtccaggaccagatggattcacagccaaattctaccagaggtacaaggaggagctggtaccattcc

SEQ ID NO: 281 - DNA, 401 bp, Homo sapiens
atcagcttagggagattttgggctgagacgatggggttttctaaatatacaatcatgtcatctgcaarcagggacaatttgacttcctcatttcctaattgaataccctttatttctttctcctgcctgattgtctctgaagatagaccaatagcaggctctgaaattgaggtaataattaatagcttacctaccaaaaawagtccaggaccagatggattcacagccaaattctaccagaggtacaaggaggagctggtaccattccttctgaaactcttccaatcaatagaaaaagagggaatcctccctaactcatttcatgaggccagtgtcatcctgataccaaagactggcagagacacaacaaaaaaagagaattttagaccaatatccctgat

SEQ ID NO: 282 - DNA, 401 bp, Homo sapiens
ggaccagatggattcacagccaaattctaccagaggtacaaggaggagctggtaccattccttctgaaactcttccaatcaatagaaaaagagggaatcctccctaactcatttcatgaggccagtgtcatcctgataccaaagactggcagagacacaacaaaaaaagagaattttagaccaatatccctgatgaacatmggtgcaaaaatcctcagtaaaatactggcaaaccgaatccagcagcacatcaaaaagcttatccaccgtgatcaagtgtgtttcatccctgggatgcaaggctggttcaacatacacaaatcaataaatgtaatccagcatataaacagaactaaagacaaaaaccacatgattatctcaatagatgcagaaaacacctt

SEQ ID NO: 283 - DNA, 401 bp, Homo sapiens
taaaatactggcaaaccgaatccagcagcacatcaaaaagcttatccaccgtgatcaagtgtgtttcatccctgggatgcaaggctggttcaacatacacaaatcaataaatgtaatccagcatataaacagaactaaagacaaaaaccacatgattatctcaatagatgcagaaaacacctttgagaaaattcaacagcycttcatgctaaaaactctcaataaattaggtattgatgggacatatctcaaaataataagagctatttgtgataaacccacagccaatattatactgaattggcaaaaactggaagcattccctttgaaaactggcacaagacagggatgccctttctcaccactcctattcaacatagtgttggaagttctggccaggg

SEQ ID NO: 284 - DNA, 401 bp, Homo sapiens
aaactctcaataaattaggtattgatgggacatatctcaaaataataagagctatttgtgataaacccacagccaatattatactgaattggcaaaaactggaagcattccctttgaaaactggcacaagacagggatgccctttctcaccactcctattcaacatagtgttggaagttctggccagggcagtcaggcaaycagaaattggttatttgttccagtagtcttttggaggagtctttatggcttactcagtatagatcatatcatcagcaaagagagataatttgatttttttacctatgtggatgccttttatttctttctcttgcctgattcctctgggaaggacttgcagtactctattgaataggagtggtgagagttggcaaccttgg

SEQ ID NO: 285 - DNA, 401 bp, Homo sapiens
cttggcttgttccagttcttaaagagaatgctccccgtttttgcctgttcactacaatgttggctgtgggtttgtcatagatgtctcttattgttttgatatatgttccttcagtgcctagttttttgagaacttttaccaagaagggatgttggactatattgaaagttttttgcatctattgagatgataatattgttkttgttcttaattctgtatatgtggtgaatcacatttgttgatttgcatatgttgaaccaaatttgtawcccaagamttaagcctacttggtcacggtgaatgaactttttgatgtgctgctggattcaatttgttagtattttgttgaggatttttgtatctatgttcgtcatggatattggcctgtaattttcttttta

SEQ ID NO: 286 - DNA, 401 bp, Homo sapiens
ggtttgtcatagatgtctcttattgttttgatatatgttccttcagtgcctagttttttgagaacttttaccaagaagggatgttggactatattgaaagttttttgcatctattgagatgataatattgttkttgttcttaattctgtatatgtggtgaatcacatttgttgatttgcatatgttgaaccaaatttgtawcccaagamttaagcctacttggtcacggtgaatgaactttttgatgtgctgctggattcaatttgttagtattttgttgaggatttttgtatctatgttcgtcatggatattggcctgtaattttctttttaagttgcgtctttgccaggtttggttattagagtaggctgacttcatagaataagttaaggaagagtcc

SEQ ID NO: 287 - DNA, 401 bp, Homo sapiens
atagatgtctcttattgttttgatatatgttccttcagtgcctagttttttgagaacttttaccaagaagggatgttggactatattgaaagttttttgcatctattgagatgataatattgttkttgttcttaattctgtatatgtggtgaatcacatttgttgatttgcatatgttgaaccaaatttgtawcccaagamttaagcctacttggtcacggtgaatgaactttttgatgtgctgctggattcaatttgttagtattttgttgaggatttttgtatctatgttcgtcatggatattggcctgtaattttctttttaagttgcgtctttgccaggtttggttattagagtaggctgacttcatagaataagttaaggaagagtccctcctcct

SEQ ID NO: 288 - DNA, 401 bp, Homo sapiens
ccctcattgatttcttttatttttctagctttggggttagttttttgtatttctagtgtgatgttagattattaaattgagatatttctaccttcttgatgtaggagttcagcactatacactttcctcttaacactacttttgcagcatcccagagatttttggtatgtcgtctctctgtttttattcctttcaaataayttttttttgatttctacctttattttgttgtttaccccaaactcattcaggataagctgtttaaatcccatgtaatggggttttgagagatctgttggtattaatttctatttttattccactgtggtccaaaaatatggctagtatgatttcagtttttttgaatttagagacttgctttatggctaagcatgtgattg

SEQ ID NO: 289 - DNA, 401 bp, Homo sapiens
cttgatgatctgtgtaaggggatcagtggggtgttgaagtcccctgctattcttgtgaggctgtgtaaatcttttctaggtcaaaaagtacttgttttatgagtctgggtgctcccatgttgggtgcatacatatttagcatagttaagtctttttgttgaattgaaccctttatcattatgtaatgtccttctttgtccytttttactgytgttgatttaaagtctgtttttttctatgagaatagcaaccttagctcttttttgtgttccatttgcatgatagatcttttccaaccctttactttgagcctatgggtgtcattacatgtgagattggtctcttgaagacaacagtcaaatgggtcttgtatctttgtacaaattgccactctgtgcctt

SEQ ID NO: 290 - DNA, 401 bp, Homo sapiens
tgtgtaaggggatcagtggggtgttgaagtcccctgctattcttgtgaggctgtgtaaatcttttctaggtcaaaaagtacttgttttatgagtctgggtgctcccatgttgggtgcatacatatttagcatagttaagtctttttgttgaattgaaccctttatcattatgtaatgtccttctttgtccytttttactgytgttgatttaaagtctgtttttttctatgagaatagcaaccttagctcttttttgtgttccatttgcatgatagatcttttccaaccctttactttgagcctatgggtgtcattacatgtgagattggtctcttgaagacaacagtcaaatgggtcttgtatctttgtacaaattgccactctgtgccttttaagtgagg

SEQ ID NO: 291 - DNA, 401 bp, Homo sapiens
ctatgtacttaagtggtttttttttggtggagcaagtatatttctttcatttctatgtttaaatcttccttgaggatctcttataagggtggtctagtgttaataaatccccttagtgcttggttgtctgaaaaatattttattttttctttgcttatgaattttagtttggcaggatatgaaatcttggttggaatttcktttctttaacaatgctggaaataggcccccaatctgttctggcttataaggtttctgctgagaagtccagtgttagactgacggggttccctttgtgagtgttctgacctttttctctagctgtctttaagatttttgctttagcattgaccttagacagtctggtgacaatctgcctgggtgatgttcatttagtatat

SEQ ID NO: 292 - DNA, 401 bp, Homo sapiens
ccccaatctgttctggcttataaggtttctgctgagaagtccagtgttagactgacggggttccctttgtgagtgttctgacctttttctctagctgtctttaagatttttgctttagcattgaccttagacagtctggtgacaatctgcctgggtgatgttcatttagtatattatgtcacaggcattctctgtatttcytttgcttggatgtctacctgtctaggaagattagataacttttcttgaattattccctcaaatgttttctagattgttttctttgtctctctttctctcaggagtgccaataattcataggtttggtcacttcatataatcccatatttcttgaagaccgtttatttttaaaattcttttttctttacttttgtctgact

SEQ ID NO: 293 - DNA, 401 bp, Homo sapiens
cattacctttttaactccactttttctttttgtattttatttttgttttgctttttttttgttgctcttctcattcctctattcattgcatcctctaataattcttttcagacagcatttccaagtggtaaatgatgtcagtctttttctttctttctgtaatttctatatatttgaaatcctgtatttatctaactcttygtatttaccaggttagataaaactaatctggttaatttttatttctatagtaaaatttttttattataccttaagttctagggtacatgtgcacaaggtgcaggtttgatacataggtrtacatgtgccatgttgctttgcagcacccatcactcatcatttacattaggtatttctcctagtgctatmcctccccagcc

SEQ ID NO: 294 - DNA, 401 bp, Homo sapiens
tccaagtggtaaatgatgtcagtctttttctttctttctgtaatttctatatatttgaaatcctgtatttatctaactcttygtatttaccaggttagataaaactaatctggttaatttttatttctatagtaaaatttttttattataccttaagttctagggtacatgtgcacaaggtgcaggtttgatacataggtrtacatgtgccatgttgctttgcagcacccatcactcatcatttacattaggtatttctcctagtgctatmcctccccagcccccagccccccaacaggcctcactatgtgatgttccctgctctatatccaagtgatctcattgttcaattcccacctatgggtgagaacatgwggtgcttggttttcatccttgtgaca

SEQ ID NO: 295 - DNA, 401 bp, Homo sapiens
atctaactcttygtatttaccaggttagataaaactaatctggttaatttttatttctatagtaaaatttttttattataccttaagttctagggtacatgtgcacaaggtgcaggtttgatacataggtrtacatgtgccatgttgctttgcagcacccatcactcatcatttacattaggtatttctcctagtgctatmcctccccagcccccagccccccaacaggcctcactatgtgatgttccctgctctatatccaagtgatctcattgttcaattcccacctatgggtgagaacatgwggtgcttggttttcatccttgtgacagtttgctcagaatgatggtttccagcrtcatccatgtccctgaaaaggacgtgaactcatccttttttat

SEQ ID NO: 296 - DNA, 401 bp, Homo sapiens
acaaggtgcaggtttgatacataggtrtacatgtgccatgttgctttgcagcacccatcactcatcatttacattaggtatttctcctagtgctatmcctccccagcccccagccccccaacaggcctcactatgtgatgttccctgctctatatccaagtgatctcattgttcaattcccacctatgggtgagaacatgwggtgcttggttttcatccttgtgacagtttgctcagaatgatggtttccagcrtcatccatgtccctgaaaaggacgtgaactcatccttttttatggctgcatagtattccatggtgtatatatgccacattttcttaatccagtctatcattgatggacatttgggttggttacaagtctttggtattgtgaatagtg

SEQ ID NO: 297 - DNA, 401 bp, Homo sapiens
cccatcactcatcatttacattaggtatttctcctagtgctatmcctccccagcccccagccccccaacaggcctcactatgtgatgttccctgctctatatccaagtgatctcattgttcaattcccacctatgggtgagaacatgwggtgcttggttttcatccttgtgacagtttgctcagaatgatggtttccagcrtcatccatgtccctgaaaaggacgtgaactcatccttttttatggctgcatagtattccatggtgtatatatgccacattttcttaatccagtctatcattgatggacatttgggttggttacaagtctttggtattgtgaatagtgctgcaataaacatacatgtacatgtgtctttatagtagcatgacttctaatcc

SEQ ID NO: 298 - DNA, 401 bp, Homo sapiens
tgtgtctgttggctgcatagatgtcttcttttgagaagtgtctgttcatatcctttgctcactttttgatgggcttgtttttttcttataaatttgtttaagttctttgtagattctggatattagccctttgtcagatgggtagattgcaaaaattttttcccattatgtaggttgccggttcactctgatggtagtttyttttgccatgcagaagctctttagtttaattagatcccatttgcctactttggcttttgttgccattgcttttggtattttagtcatgaagtccttgcctatgcctatgtcctgtatggtattacctaggttttcttctagggtatttatagttttaggcctaacattcaagtctttaatccatcttgaattaatttttg

SEQ ID NO: 299 - DNA, 401 bp, Homo sapiens
ccttgcctatgcctatgtcctgtatggtattacctaggttttcttctagggtatttatagttttaggcctaacattcaagtctttaatccatcttgaattaatttttgtataaggtataaggaagggatccagtttcagctttctacatatggctagccagtttttccagcacgatgtattaaatagggaatcatttcccyatttcttgtttttgtcaggtttgtcaaagatcagatggttgtagatgtgtggtattatttctgaggcttctattctgttccatttgtctatatctctgttttggtaccagtaccctgctgttttggttactgtagccttgtagtatagtttgaagtcaggtagtgtgatgcctccagctttgttctttttgcttaggatt

SEQ ID NO: 300 - DNA, 401 bp, Homo sapiens
ttcctaattgaataccctttatttctttctcttgcctgattgccttggctggaacttccaacactatgttgaataggagtggtgagagggggcatccttgtcttgtgccggttttcaaagggaatgcttccagtttttgtccattcggtatgatattggttgtgggtttgtcatagatagctcttattattttgagatacmttccctcaatacctagtttattgagagtttttagcatgaagagctgtcgaattttgttgaaggccttttctgcatctattgagacaatcatgtggtttttgtcatttgttctgttaatgcaatggattatgtttattgatttgtgtatgttgaaccagtcttgcatcccagggaggaatctgacttggtcatggtggata

SEQ ID NO: 301 - DNA, 401 bp, Homo sapiens
gctcctctttgtacctctggtagaattcagctgtgaatccatctggtcctggagtttttttggttggtagcctattaattattacctcaatttcagagcctgttattgatctattcagagattcaacttcttcctggtttagtcttgggagggtgtaggtgtccagaaatgtatccatttcttctagattttctagtttayttgtgtagaggtgtttataatgttctctgatggtagtttgtatttttgtggaatcgatggtgatatcccctttatcrttttttattgtgtctatttgactcttccctgttttcttctttattagtcttgctagctataattttgttgatcttttcaaaaaaccagctcctggattcattgattttttgaagggttttttt

SEQ ID NO: 302 - DNA, 401 bp, Homo sapiens
attattacctcaatttcagagcctgttattgatctattcagagattcaacttcttcctggtttagtcttgggagggtgtaggtgtccagaaatgtatccatttcttctagattttctagtttayttgtgtagaggtgtttataatgttctctgatggtagtttgtatttttgtggaatcgatggtgatatcccctttatcrttttttattgtgtctatttgactcttccctgttttcttctttattagtcttgctagctataattttgttgatcttttcaaaaaaccagctcctggattcattgattttttgaagggtttttttaatgtatctatctctttcagttctgctctsttcttagttatttcttgccttctgctagcttttgaatgtgtttgctc

SEQ ID NO: 303 - DNA, 401 bp, Homo sapiens
atggtagtttgtatttttgtggaatcgatggtgatatcccctttatcrttttttattgtgtctatttgactcttccctgttttcttctttattagtcttgctagctataattttgttgatcttttcaaaaaaccagctcctggattcattgattttttgaagggtttttttaatgtatctatctctttcagttctgctctsttcttagttatttcttgccttctgctagcttttgaatgtgtttgctctggcttctctagttcttttaattgtgatgttagggtgtcgattttaaatctttcctgttttctcttgtgggcatttagtggtataaatttccctgtacacactgctttaaatgtgtcccagagattctggtatgttgtgtccttgttctcatt

SEQ ID NO: 304 - DNA, 401 bp, Homo sapiens
acactgctttaaatgtgtcccagagattctggtatgttgtgtccttgttctcattggtttcaaagaacatctttatttcttccttcatttcgttatttacccagcagttatttaggagcaagttgctcactttccatctagttgtgtggttttgagtgagtttcttaatcctgagttctaatttgattgcactgtggtctraaagacagtttgttgtgattgctgttcttttacatttkctgaggagtgctttacttccaactatgtggtcaattttaraataagtgtgatgtggtgctgagaagaatgtatattccgttgatttggggtggagagttctgtagatgtctattaggtctgcttgttgcagagctgagttcaggtcctggatatccttatta

SEQ ID NO: 305 - DNA, 401 bp, Homo sapiens
gtgtccttgttctcattggtttcaaagaacatctttatttcttccttcatttcgttatttacccagcagttatttaggagcaagttgctcactttccatctagttgtgtggttttgagtgagtttcttaatcctgagttctaatttgattgcactgtggtctraaagacagtttgttgtgattgctgttcttttacatttkctgaggagtgctttacttccaactatgtggtcaattttaraataagtgtgatgtggtgctgagaagaatgtatattccgttgatttggggtggagagttctgtagatgtctattaggtctgcttgttgcagagctgagttcaggtcctggatatccttattaaccttctgtcttgttgatctgtctaatattgacagtgg

SEQ ID NO: 306 - DNA, 401 bp, Homo sapiens
cttccttcatttcgttatttacccagcagttatttaggagcaagttgctcactttccatctagttgtgtggttttgagtgagtttcttaatcctgagttctaatttgattgcactgtggtctraaagacagtttgttgtgattgctgttcttttacatttkctgaggagtgctttacttccaactatgtggtcaattttaraataagtgtgatgtggtgctgagaagaatgtatattccgttgatttggggtggagagttctgtagatgtctattaggtctgcttgttgcagagctgagttcaggtcctggatatccttattaaccttctgtcttgttgatctgtctaatattgacagtggggtgttaaagtstcccattattattgtgtgggagtctaag

SEQ ID NO: 307 - DNA, 401 bp, Homo sapiens
tttacttccaactatgtggtcaattttaraataagtgtgatgtggtgctgagaagaatgtatattccgttgatttggggtggagagttctgtagatgtctattaggtctgcttgttgcagagctgagttcaggtcctggatatccttattaaccttctgtcttgttgatctgtctaatattgacagtggggtgttaaagtstcccattattattgtgtgggagtctaagtctctttgtaggtctctaaggacttgctttatgaatctgggtgctcctgtattgcatgcatatatattaggatagttagctcttcttgttgaattgatccctttaccattatgtaatggccttctttgtctcttttgatctttgttggtttaaagtctgttttatcagagac

SEQ ID NO: 308 - DNA, 401 bp, Homo sapiens
actgatagatgttgactctttattcaatttgccagtctgtgtcttttaattggtacatttagcccatctacatttaaggttaatattgttatgtgtgaattcatcctgtcattatgatgttcgctggttatttcgcccattaattgatgcagtttcttcatgccatcaatggtctttacaatttggcctgtttttgcagtsgctggtaccagttgtttctttccctgtttagtgcttccttcaggagctcttgtaaggcaggcctggttgtgacaaaactctcagcatttgcttgtctgtaaaggattttatttctccttcacttatgaagcttagtttggctggatacaaaattctggtttgaaaattcttttctttaagaatgttgaatattggccccc

SEQ ID NO: 309 - DNA, 401 bp, Homo sapiens
aggattttatttctccttcacttatgaagcttagtttggctggatacaaaattctggtttgaaaattcttttctttaagaatgttgaatattggccccccactctcttctggcttgtaaggtttctgccgagatatctgctgttagtctgatgggcttccctttgtgggtaacctgatctttctctctggctgcccttaamattttttccttcatttcaaccttggtgaatctgacaattatgtgtcttggggttgctcttctcgaggagtatctttgtcgtgttttctgtatttcctgaatttgaatgttggcctgccttgctaggttggggaagttctcctggataatatcctgaagagtattttccaacttggctccattctccccatcactttcagg

SEQ ID NO: 310 - DNA, 401 bp, Homo sapiens
actgatacactttcttccacttgatcgaagcagctgttgaagcttgtgcatgcatcatgaagttcttgtgccgtggttttcagctccatcaggtcatttaaggtcttctcttcactctttattgtagttagctattcatctaatctttcttcaaggtttttagcttccttgcaatgggtttgaacatcctcctttagctcrgagaagtttattaccaaccttctgaaacctacttctgtcaactygtcaaagtcattccccatccagctttgttctgttgctgacgaggagctgtgatcctttgaaggagaagagtcgctctgatttttagaattttcagcttttctgctctggtttctccccatctctgtgtttttatctgcctttggtctttgatgttg

SEQ ID NO: 311 - DNA, 401 bp, Homo sapiens
tgtgcatgcatcatgaagttcttgtgccgtggttttcagctccatcaggtcatttaaggtcttctcttcactctttattgtagttagctattcatctaatctttcttcaaggtttttagcttccttgcaatgggtttgaacatcctcctttagctcrgagaagtttattaccaaccttctgaaacctacttctgtcaactygtcaaagtcattccccatccagctttgttctgttgctgacgaggagctgtgatcctttgaaggagaagagtcgctctgatttttagaattttcagcttttctgctctggtttctccccatctctgtgtttttatctgcctttggtctttgatgttggtgacctatagatggggtttttgtgtagatgactttttgttgat

SEQ ID NO: 312 - DNA, 401 bp, Homo sapiens
tattcctttatgtttgttagttttccttctaacagtcaggtccctcagctgcaggtctgttggattttgctggacatccactccagaccctatttgcctgggtatcaccagcagaggctgcagaatagcaaatattgttacctgatccttcctctggatgctttgtccaagaggggcagccacctatatgaggtgcctgtyggcccctactgggaggtgtcacccagttagtcagggacccacttgaggaggcagtctgtccattctcagagctcaaccaccatgctgggagaaccactgctgtcttcagagctgtcagwcagggatgtttaagtctgtagaagttgtctgctttcttttgttcagctatgccctacccacagaggtggagactagaggca

SEQ ID NO: 313 - DNA, 401 bp, Homo sapiens
gcagaatagcaaatattgttacctgatccttcctctggatgctttgtccaagaggggcagccacctatatgaggtgcctgtyggcccctactgggaggtgtcacccagttagtcagggacccacttgaggaggcagtctgtccattctcagagctcaaccaccatgctgggagaaccactgctgtcttcagagctgtcagwcagggatgtttaagtctgtagaagttgtctgctttcttttgttcagctatgccctacccacagaggtggagactagaggcagtaggccttgttgagctgcagtgggctctgcccagttcaagcttccaggccactttgtttacctactgaagcctcagcaatggcggacacccctcacccagccaggctgtcgyctcaca

SEQ ID NO: 314 - DNA, 401 bp, Homo sapiens
tgtcagwcagggatgtttaagtctgtagaagttgtctgctttcttttgttcagctatgccctacccacagaggtggagactagaggcagtaggccttgttgagctgcagtgggctctgcccagttcaagcttccaggccactttgtttacctactgaagcctcagcaatggcggacacccctcacccagccaggctgtcgyctcacaggttgatctcagactgctgcactagcagggagcaaggctccatgagcatgggagctgccaagctaggcataggagagaatctccttgtctgctggttgctaagaccttaggaaaagcagggtatttgggcggaagtgtcctgtttttccaggtagtctgtctcggcttcccttggctaggaaggggaaatcccc

SEQ ID NO: 315 - DNA, 401 bp, Homo sapiens
aagaatctgtgccctgggctcaccatttctactgggtgttgacagttgcctgaagcacaactttgtctctctgacccagtgttttgccactctcctccacctgaagaagatttttttttttctattgcttggctcttgggcaggttgaggagagaagagaggagatgaaggatgtgtaggttgctcctgctgtaaagatcygccctattttgcctggcccctgtcctatttctagtttctgctaccttcagacatgaggttactggtgcttctcctgtcttttgtagtttcgactctcttaagtgcatttgggctgtggttcccatctccaattcaatcttctgctttctgccttttaaagtcctgacagtatctcctttttttttgttttctgttgttga

SEQ ID NO: 316 - DNA, 401 bp, Homo sapiens
gcagttagcagctacttagggctatagtttttagttatgtttttacagtatatatttccatcctatgttctcttactctagaaaatgtaagataaatctagggctatccctgtataattttagcctcatagaatcttgaaatgaagaataggtgttgaccagttttttagaaacagggtagggggtcttgttctttcatcraggctggagtgcagtggtctaatcatagctcactacagccttgacctcctgggctcaagccatcttcccaccttccaagtagttgggattagagtcatgagccaccatgcttggctccagttttcttatttgtttgccaagtggattgtcttcttttctgttattcaaacaaataaatatgcaaaacagcaaaaaaagtt

SEQ ID NO: 317 - DNA, 401 bp, Homo sapiens
tcaggaaaaaggctgctcatgttgtactaattctggcttctcatttccgtctcttagttctgcttctgtgggagctgccctccctgaaaatgtgtgtttctgtagtggggtacgatccactgacgttcctgaaggaagagcagttctttaggtgcctgacttggtgaggactttgtcattgatgccttaaagcatcaatgrtcatgatgagagccttacgtagtctttcatgaagtcagctccttcacctgtcaccatcccatttttccctccacaggtgtcaygtagggaggagagaaggaaattccttggcatcccctttatcatctttaccatttctttgaccttgtccaaccagtcatatcacaaacaagcaaacaaccaagcaaaacccaaatatt

SEQ ID NO: 318 - DNA, 401 bp, Homo sapiens
ctgaaaatgtgtgtttctgtagtggggtacgatccactgacgttcctgaaggaagagcagttctttaggtgcctgacttggtgaggactttgtcattgatgccttaaagcatcaatgrtcatgatgagagccttacgtagtctttcatgaagtcagctccttcacctgtcaccatcccatttttccctccacaggtgtcaygtagggaggagagaaggaaattccttggcatcccctttatcatctttaccatttctttgaccttgtccaaccagtcatatcacaaacaagcaaacaaccaagcaaaacccaaatattttcttcttttagtcaaaacacgaaaactaatatgaatattaattcatgcaaatgaaaacctgcaatgatcacccacaaaccag

SEQ ID NO: 319 - DNA, 401 bp, Homo sapiens
gtcaaaattggagccacttttcaagacctagctcaggattttgctctgaaacccttcctgatcctcccggtttaatttaatcactccttcctcttcttcttaacagcacttcttatctgtaccggtcctttgaccctgaatcatatgctactttatatggttcattgcatttgcaagcctatttgtctgatcttagctagwttaaaaagsctttgagggcagaggctgtttgtttctgtgcttatactatctagtggctgtatagggggaaaaattacatgttgatgatcccaactaatccttttgctccaggatacgtggcttcctcaggacatgccatgcatatgtgaggtctattttaattcataacatcctagatatggctccagagtcagataaac

SEQ ID NO: 320 - DNA, 401 bp, Homo sapiens
ggagccacttttcaagacctagctcaggattttgctctgaaacccttcctgatcctcccggtttaatttaatcactccttcctcttcttcttaacagcacttcttatctgtaccggtcctttgaccctgaatcatatgctactttatatggttcattgcatttgcaagcctatttgtctgatcttagctagwttaaaaagsctttgagggcagaggctgtttgtttctgtgcttatactatctagtggctgtatagggggaaaaattacatgttgatgatcccaactaatccttttgctccaggatacgtggcttcctcaggacatgccatgcatatgtgaggtctattttaattcataacatcctagatatggctccagagtcagataaacctaaatttg

SEQ ID NO: 321 - DNA, 401 bp, Homo sapiens
tgttttgtttcatgttaatgctttttcttccagcaactgcccaaagcccctcttcctcatgttggggctcagaagctgataccccaatacatggcgctttgacatgttgagttgaaggaaaagcctcaggtctctttgaccttcccctccactcccgatattctgtcttccccaaagcacagggtgaaattgttctctgargttccttgatctgcctaaagtctggaactgccaaagaataaaacaattacctctgttcccttccctgagtttgtattaattgaaatcacttttagggaagaaagattgaagtctgttaacacgcctggacagacttttgtcataaaccattgtcttctgcttcagtcccattcagtattatatagaaccatttaccagcc

SEQ ID NO: 322 - DNA, 401 bp, Homo sapiens
aagtctggaactgccaaagaataaaacaattacctctgttcccttccctgagtttgtattaattgaaatcacttttagggaagaaagattgaagtctgttaacacgcctggacagacttttgtcataaaccattgtcttctgcttcagtcccattcagtattatatagaaccatttaccagccattgtctgctctatgggyccaacagactttgtcccaggccattgtatattcttcaagcccattgaattcccctaaaaataatttactactccccccataaaatcatccatatttcctcatctcacattatcctaagaagaagggtagataaccacttgtaccccactgggtgttggggtgatcactctgtgatttctcccatgcatgttawtaagaat

SEQ ID NO: 323 - DNA, 401 bp, Homo sapiens
ctatgggyccaacagactttgtcccaggccattgtatattcttcaagcccattgaattcccctaaaaataatttactactccccccataaaatcatccatatttcctcatctcacattatcctaagaagaagggtagataaccacttgtaccccactgggtgttggggtgatcactctgtgatttctcccatgcatgttawtaagaatttatatgtcttttctagtattaatctgccttttgttgatttttttgcaaaactttggagggaaaaagggaagtttgcccttcacccctatacttttcttcttgtttgtagagtcactgactcattgttaccattttcttatctccattctcttaccaacccaatgcaatagagtttctcctacaggtcctctg

SEQ ID NO: 324 - DNA, 401 bp, Homo sapiens
gctgaggtgggcagatcacttgaggtcaggagtttgagaccagcctggccaacatggcaaaaccccgtctctactaaaaatacaaaaattatttgggcatggcggcacatacctgtaatcccatctacttgggaggctgaggcaggagaattgcttgaacctgggaggtggaggttgcagtgagccaagatggcgccactrtattccagcctgggtgaaagagtgagtgagactctgacacacacacacacacacacacatacacacacacacacacacaaagtagtaagcactcaggagttcgataaccacctttatgttgatggcttctaaatctctgatatcagtccagatccttttcttgacctcaactacagggccaactaactactagatttctc

SEQ ID NO: 325 - DNA, 401 bp, Homo sapiens
ctagatttctcaaacactattaagacagaactcttcacctctcccaggtctccaaatttattcttcctctcctgttccttctctcagggaatgacaccattatccattctgttgttattcaagtaaaacagactcacatccttcttgacatttcatttttttatatccaattaatcatcaaatttctactcaagcttcctkaccctgttttcctcttctgggtagataggtcttgtttgataattcatctgcaaatatatagactagagtgcttacttaaaaaccgctctcttgtttttcttttcatccacctgttaccacatagcttaatcagttttgccacatccctttcagtgtggacttagaaaatatacccccaaaaagcttcagtttcaattagc

SEQ ID NO: 326 - DNA, 401 bp, Homo sapiens
ctgggtagataggtcttgtttgataattcatctgcaaatatatagactagagtgcttacttaaaaaccgctctcttgtttttcttttcatccacctgttaccacatagcttaatcagttttgccacatccctttcagtgtggacttagaaaatatacccccaaaaagcttcagtttcaattagctgggcgtgatagcacgygcctgtaatcccagctactcgggaggctgaggcatgagaattgcttaagcccagaggtggaggttgcagtgagccaagaatgggccactgcactctagcctgggcgacagagcgagactccgtctcaaaaaaaaaaaaaaaaaaaaagaaatgaatgygcatatgactaccatcctaatataaatggagcttatgccagt

SEQ ID NO: 327 - DNA, 401 bp, Homo sapiens
cccaaaaagcttcagtttcaattagctgggcgtgatagcacgygcctgtaatcccagctactcgggaggctgaggcatgagaattgcttaagcccagaggtggaggttgcagtgagccaagaatgggccactgcactctagcctgggcgacagagcgagactccgtctcaaaaaaaaaaaaaaaaaaaaagaaatgaatgygcatatgactaccatcctaatataaatggagcttatgccagtactatttgcagtagtactacttgaaataatgctcacaataaattttatgcttattaaatagtaattatacataatatagaaagtcaaatagtgctacaaaacttacaataacaacactcattaacttgacccccttccaaatctgatttttttacttc

SEQ ID NO: 328 - DNA, 401 bp, Homo sapiens
cattaacttgacccccttccaaatctgatttttttacttctccaaggcaaccactttcaattcttttagttacactttcaacacttctattgttgtctccttatttctaaattaaatgcttatactgtgacttcttgattttaaactttaggtattatttattgacttcctgttttgagagttttgctttcttataccacwcctccccttgcctttcccccctgattaytcctctctccatcttcctaatagatttacatataatttctatttacgtttagaattttcattaccatgactatggctagagctgagccctgtagtgtactacatataataacatttttgttttactacaaatgcttttgcttttcctggagttaaaatgttcttattttaat

SEQ ID NO: 329 - DNA, 401 bp, Homo sapiens
tttttttacttctccaaggcaaccactttcaattcttttagttacactttcaacacttctattgttgtctccttatttctaaattaaatgcttatactgtgacttcttgattttaaactttaggtattatttattgacttcctgttttgagagttttgctttcttataccacwcctccccttgcctttcccccctgattaytcctctctccatcttcctaatagatttacatataatttctatttacgtttagaattttcattaccatgactatggctagagctgagccctgtagtgtactacatataataacatttttgttttactacaaatgcttttgcttttcctggagttaaaatgttcttattttaatgtgttttcttacatttctttttacctat

SEQ ID NO: 330 - DNA, 401 bp, Homo sapiens
ttactaaatcagtcatatgctttgcacaagcactataaaaatcttctcagtatggtcaggtttttttcttttttcttggcgaattcctcctagaaatctctatctgactactctaatcttaactggttacattctaagcctgctccacagctgttgttttagacacttatattcactcttttttggaaattccctttaccrctctccttggttctttgtaacattactggatttcctgaatactatttcttagattccatcttatttgttagagcacattctccaataatttcctgagaaaggggttaggggaaataatgttttgtagaaacttgcatgtctgaaactatgtattatattgtcacatttgattagctgttttgccagacattgagttttaa

SEQ ID NO: 331 - DNA, 401 bp, Homo sapiens
gtagagactgggtttcacccagtcaggctggtctggaactcctgacctcagctaatccatctgcctcagcatcccaaagtgctgggattacaggagtgagccaccatacccagctgatattacattttaaaaaggagagtctgggtaggcctcattgagaatgtttgatgatgcttgactgctcatcatatttacaaatgmggtatgaaaaagtaattggaagcactttgtaaatgtgtgcatgtgggggatggattgttttgtgaaccattgggccttaccatagattaattgagcatttaaccacttctttgggccctttgccttgaactgactgctttctccaggagaagctttattctcctgtctgaaacatatgtgccagactgccagcattctgr

SEQ ID NO: 332 - DNA, 401 bp, Homo sapiens
mggtatgaaaaagtaattggaagcactttgtaaatgtgtgcatgtgggggatggattgttttgtgaaccattgggccttaccatagattaattgagcatttaaccacttctttgggccctttgccttgaactgactgctttctccaggagaagctttattctcctgtctgaaacatatgtgccagactgccagcattctgragccaagtcactatgtagatcatctctctttttatttgagacaaggtctggctctgtcgcccaggctggagtgcagtggcatgatctcagctcactgcaacctctgcctcccaggccaatgcyatcctcccacctcagattcccaagtagctagggctccagccacgcaccatcatgcccagctaatttttatatttttt

SEQ ID NO: 333 - DNA, 401 bp, Homo sapiens
ccttgaactgactgctttctccaggagaagctttattctcctgtctgaaacatatgtgccagactgccagcattctgragccaagtcactatgtagatcatctctctttttatttgagacaaggtctggctctgtcgcccaggctggagtgcagtggcatgatctcagctcactgcaacctctgcctcccaggccaatgcyatcctcccacctcagattcccaagtagctagggctccagccacgcaccatcatgcccagctaatttttatattttttgcagagacaggatttcaccatgttttccaggctggtctcaaacccgtgagctcaagtgatccacctgccttagcctcccaaagtgctgggattacaggcctgagccaccatgcccagtcaata

SEQ ID NO: 334 - DNA, 401 bp, Homo sapiens
tttggaggaagacaagataaacctgccctatttaataagaagtccaaaataaaagacttaatccaaattacttgaaaacttttctgaatatatgaaataaaattttcattctcacaatgagaatagtctttcattctctatgaattctccaaataatttagtgattaagaaaacagatctattttcttaatatttcataarccttttggttacatactaaaacaatgtattaatattcttatacggtaatcatatttgagttggttcattagactttattttaacattatgagtaatttttttttttattagaaagtcttttgaattgtagggcataaggaatttttagttgtgactcctaggtctaacatttaaaaaaattcaaaacacactgtcttagc

SEQ ID NO: 335 - DNA, 401 bp, Homo sapiens
attttgtaagcctgactccatagaccataaaatattggaaagatcacttgctatgaagtcaataaacttggaatttaatctcaactataccactggctacctgactttaaatgaaatgaacacttttgacctcaagttcctaatctttaaaatggggcttaaactagttggcctaataccaatattgaatgattatttgayagttacatagaaatagattggatgtagaaatagagatatgaattgcatggtgtttgctcactagaatgtggaaaactgtaaaggatgcatgaatatcaagcaaagagaaataagtcacataggttgcctgccattctttaatgcttattttctttcaattttttctttttaataatcttactaaagtgaagctggggctg

SEQ ID NO: 336 - DNA, 401 bp, Homo sapiens
ttggatgtagaaatagagatatgaattgcatggtgtttgctcactagaatgtggaaaactgtaaaggatgcatgaatatcaagcaaagagaaataagtcacataggttgcctgccattctttaatgcttattttctttcaattttttctttttaataatcttactaaagtgaagctggggctgttagtggtggcaaatccrtatgggyctgcagcaaccttacttcttgcctccttagaagaaagaattcaactgaggggcattaggcagagggagaaactgaggaaagttttagagcatgagtgaaagtttatttaaaagctttagagaagtaatgaaattcctttcattacttctcaagccggcgacttgagagatcaagtgcactgtttgccctttga

SEQ ID NO: 337 - DNA, 401 bp, Homo sapiens
tagaaatagagatatgaattgcatggtgtttgctcactagaatgtggaaaactgtaaaggatgcatgaatatcaagcaaagagaaataagtcacataggttgcctgccattctttaatgcttattttctttcaattttttctttttaataatcttactaaagtgaagctggggctgttagtggtggcaaatccrtatgggyctgcagcaaccttacttcttgcctccttagaagaaagaattcaactgaggggcattaggcagagggagaaactgaggaaagttttagagcatgagtgaaagtttatttaaaagctttagagaagtaatgaaattcctttcattacttctcaagccggcgacttgagagatcaagtgcactgtttgccctttgacttgggg

SEQ ID NO: 338 - DNA, 401 bp, Homo sapiens
tctggttatgtctgcctgactgactactgtaacagggccaggtcattttcttgcttaaacatcttactatagtccataggataaagatcatcactcctactcatgacatatgcacagccattgccagtggtttcaaaaggcttgcacatcacgaaggctcaataaatgttattgatttgaactgaacagtaaatagatcamgatggtataactgccttttagtgctcatagccaatgttctaaaacattctcctggtctatttttttgtctggctgccgtattgctatgatttctaaaaaaacccatagttttctggatcaggaagacactttactggtgggtcaggttatagagatcactgagaatgaagattttagtagtaaaatgatgtaaataatct

SEQ ID NO: 339 - DNA, 401 bp, Homo sapiens
gggaaaaaaagttaatagatttgctgaattttaactatttctctcctttatttttcatatcttttggatatttacttgattaccagggttcaagcaaatgattctcaatttgcttgaatcattgttttagatttattgtttagaataattgttttagattgtttatttcatgctgctttctgtgtgactgctctaggaacraagtcatgagtagaagccagggaggcatgaaagaaaaagtcttgtggcacccacaccgagaagatgctaagcagagatgtgaggaaacaaagctgagaattgagggacaatccaagggaaagaagtggactgggaaatsggttctcctggcctggaaaagacacgtcaccacagraaaaaatctggctccagagaacaat

SEQ ID NO: 340 - DNA, 401 bp, Homo sapiens
ttagaataattgttttagattgtttatttcatgctgctttctgtgtgactgctctaggaacraagtcatgagtagaagccagggaggcatgaaagaaaaagtcttgtggcacccacaccgagaagatgctaagcagagatgtgaggaaacaaagctgagaattgagggacaatccaagggaaagaagtggactgggaaatsggttctcctggcctggaaaagacacgtcaccacagraaaaaatctggctccagagaacaatttattttaatatgcctcattttgctatttcattaattcagaaatacttggcctttttttctactgttactgtggaggcataataggaaatgtaaacatactggtacaaaataagaaataacttatttatatggcaggaa

SEQ ID NO: 341 - DNA, 401 bp, Homo sapiens
ctttctgtgtgactgctctaggaacraagtcatgagtagaagccagggaggcatgaaagaaaaagtcttgtggcacccacaccgagaagatgctaagcagagatgtgaggaaacaaagctgagaattgagggacaatccaagggaaagaagtggactgggaaatsggttctcctggcctggaaaagacacgtcaccacagraaaaaatctggctccagagaacaatttattttaatatgcctcattttgctatttcattaattcagaaatacttggcctttttttctactgttactgtggaggcataataggaaatgtaaacatactggtacaaaataagaaataacttatttatatggcaggaagactagaaaaatcacagccattttcttcttcttact

SEQ ID NO: 342 - DNA, 401 bp, Homo sapiens
gaaacattctctctgatatgtttttaatttgttttattcccattttgctattgcaattttcccacctgccaatggagataaggggctgtttcattctttctcttttggctcgcgaaggccacacgcttgttttgttaaggagagtccacctatcaccaggagggacagaagtcagctcaggaagggagaccctgccagggractcagccatgaggtaaggccagccatgagtccaaagacaagtattcctgagcacctgaccgctatttatcaaacattgttctaggggatgtggggaattgtaagagaagctcaagacagtgttcttgtctgggctgatgaaaccttatcctaattcaggctacagtgaatactttatgtgcaytctgagtgttcctatc

SEQ ID NO: 343 - DNA, 401 bp, Homo sapiens
ggagaccctgccagggractcagccatgaggtaaggccagccatgagtccaaagacaagtattcctgagcacctgaccgctatttatcaaacattgttctaggggatgtggggaattgtaagagaagctcaagacagtgttcttgtctgggctgatgaaaccttatcctaattcaggctacagtgaatactttatgtgcaytctgagtgttcctatcctttccttgttatatggcaggagtttttgatatagggtacatggaccccaggaggcccttggatagaacacaagtggtaaaattccatcttttaaataattaactactaactgaaatttagccatttcttcaattatatatgttggcacaaaccacagtagtattaagagtgtctctgaccttg

SEQ ID NO: 344 - DNA, 401 bp, Homo sapiens
ggaccccaggaggcccttggatagaacacaagtggtaaaattccatcttttaaataattaactactaactgaaatttagccatttcttcaattatatatgttggcacaaaccacagtagtattaagagtgtctctgaccttgtcagcagtagaaaacactgatatttttatataatatcacagttgttgcagatatcttgraacatcatttgtgctttatcactatttttgaaaattatagtagttattagacctgcagctagagtttgttacttaatgcattcatatagaaagacatcattaaatcacatttttctggatacttttataattgtacttcaatgcaattggtgtcttttgtaatcctacgtattttctttcatacattcaaacactcatcg

SEQ ID NO: 345 - DNA, 401 bp, Homo sapiens
atgccttatataaatatatcaatgcaatgatttattattacagctgttatgccatagcatgttgggttgctgacaattttttatttttttttgtgacgaagttttgctcttgttgcccaggctggagtgcagtggcgtgatcttggcttactgcaacctctgcctcctgggttcaagtgattctcctgcctcagcctcccragtagctggaattataggtgcctgccaccatgcccagctaatttttgtattaatttttattattaattttatatttcaccatgttggccaggctggtctcgaactcctgacctcaggtgatccacccgccttggcctcccaaagtgacggtattacaggcgtgagccaccacacctggctgacaaatttgtatgtatgta

SEQ ID NO: 346 - DNA, 401 bp, Homo sapiens
acaagcctgggagatattaaccgagggatcccatggtttctcacttttccattcttccatgaagtcactgtttcacatagcttggagtctgtgaaccatgccaatatatgtgtctttttaacatggttcattttttaagtacatcattggtttggagagatgagaatgagaagatgagttaacttttattgtgaggcaccygtatggtttagactttcactgcaactttgttacaggtgagcgatatgcccttcatttcacagactctgtggggtgtccatcagcacatgagtaaagatcttcctttggagggtaaccactttctgacattaactgtgtcttgatggagaacacagcatatgagttatgagttttggcctgcgagttgtgaaagatgactc

SEQ ID NO: 347 - DNA, 401 bp, Homo sapiens
gaggaaggagcagaattgggaagaggggaaaagtgggctgtgatgcagtctaatcaaagtcataggtaatcccagaggaaagtctgagactggatggctcttggggattgtcatgagttggggcaaaggggtcagtccttcataaccctgagatcagtctttatttgctgcacccagggagaagccatgaccttgagcaargatgcgcttttcagccaggacacttaacaaagagggctgacagctgtcagcacttccagaagctggtaaaataagaccttcattcttaaagggacatcttggcagaataccaatgactattytagtccactgcttataccactcagatacacatcttcatatacatactgaaaatcaatcttctaggatcttagtaggtt

SEQ ID NO: 348 - DNA, 401 bp, Homo sapiens
gcaaaggggtcagtccttcataaccctgagatcagtctttatttgctgcacccagggagaagccatgaccttgagcaargatgcgcttttcagccaggacacttaacaaagagggctgacagctgtcagcacttccagaagctggtaaaataagaccttcattcttaaagggacatcttggcagaataccaatgactattytagtccactgcttataccactcagatacacatcttcatatacatactgaaaatcaatcttctaggatcttagtaggtttcttttgctggcagaatgttgtaagattaaggttgataggataaactggtacccttgcagaaacagctagttgcaagatctcaaatgatatttatcatctctcttcttcactatccacttta

SEQ ID NO: 349 - DNA, 401 bp, Homo sapiens
tgggtgccaaacatatttcttcgtgctccccattgtatataagaatgctactttctttcagggttaattgctaccaccaagatggtgactctttttattttaagctggtcacttgctatgaggaacctgaaatgcccaggtgtcagccaaagcttatattacaactagaattttcctatgtttcctggtggaagcatttcytctttggcttgaacttcaagccatgcagctccaagagttgcaggtatgagaagcacaaatttcccaagtgggtcactgtgagtggtgataagtgggaccactcttgcttccatatatcagttcctggatccatgtattcaagcacctgggatacaataccatataaagatcattgatttagggtgtacagtgtatttggg

SEQ ID NO: 350 - DNA, 401 bp, Homo sapiens
ttgctcatgaacccatgcacattctaactacaggacacttccttttctatgtaaagagctcaccacatgcactgccacttgtcactgttgttaagggccacctcaatgtcaggctgtgatatagctttcatccatttcctgcttgcacacacataccaagccaacccatctctaaaccaattttttttttgtttttgaaawtgatacataataattatatgtgtttatggggcacatgtgatattttcatacatgcatgcaatgtgtaatgaccaaatcargatatccatcaccttaaacatttatcatttttttgtattggaaacattccaaattttctcttctaactattctcaaatatacaataaattatagttaagtatagttatcctactgtgcta

SEQ ID NO: 351 - DNA, 401 bp, Homo sapiens
gtcactgttgttaagggccacctcaatgtcaggctgtgatatagctttcatccatttcctgcttgcacacacataccaagccaacccatctctaaaccaattttttttttgtttttgaaawtgatacataataattatatgtgtttatggggcacatgtgatattttcatacatgcatgcaatgtgtaatgaccaaatcargatatccatcaccttaaacatttatcatttttttgtattggaaacattccaaattttctcttctaactattctcaaatatacaataaattatagttaagtatagttatcctactgtgctatcgaacactagaacctgtccttctaaatgtattttttgtacccattcatcaaccacttttcacgtcctctttcccaattt

SEQ ID NO: 352 - DNA, 401 bp, Homo sapiens
tcactggcaccacagtctgaatttctatagattcttttaatgctttggtcattacttaaagttagcagtctttcatgctacctgacatatgatttggtgctgtattcctgcaatggaatatgctgcctccagaacatgggaacgcctactaggcaaggtgcttccttatttgtgatagaaagtgcaaattgcaataatttktattttctttggaagggatatcccaaaatactcaaaaccataggacttctaaaaatattactaatatatcaggccctgaatctctatagagtttatctcttatcctctagtgtgtatatgttttacctaggcctacaatgtacttgtcacttcttttttctagttggttcaattgccatgacatcctagatatagtggac

SEQ ID NO: 353 - DNA, 401 bp, Homo sapiens
tttttttttttttttttggtgggtgggggtgcggggggtgagtggttgaactaattgaattaattggagatacaatggggctcaccctcctccatccattaggtctttcattgaagccattaaatttctgccaaattccaggaagacctggaatatgacagtttattagagagtaccctggaaaaaatagccatgaaagtraaaaaaaggaagcaagcttggacagaagaaaaaactggactgaaatacaatctcagtgagtaccataactgatctctagagagctcttggtgtgcattggccctacagagctgtcctgagctaggtgaggagactggccttgatagtcttgtattgaccatttcccagatgcgtggtcaaggcagttctcttcaaccaag

SEQ ID NO: 354 - DNA, 401 bp, Homo sapiens
gtggatcacttgaaatcaggagtttgagaccagcctggccaacatggcaaaaccccgtctctactaaaaatacaaaaattagctgggcgtggcggtacacacctgtagtcccagctacttgggaggctgaggcgcgagaagcactcaaacctgggaagtggaggttgcagtgagcagatgttgcgccactgcactctagcytgggtartagagcgatactccatcaaaaaaaaaaaaaattaatggatgcttttggcaaattcaggactgaaaattgctgtgacttttcctccatgagagtttctgcagtttgggtcataagagttaaatatggttaatacttcattaagtactgtttaactttagcaacctaagacattacatgtcatcaattgttctga

SEQ ID NO: 355 - DNA, 401 bp, Homo sapiens
acttgaaatcaggagtttgagaccagcctggccaacatggcaaaaccccgtctctactaaaaatacaaaaattagctgggcgtggcggtacacacctgtagtcccagctacttgggaggctgaggcgcgagaagcactcaaacctgggaagtggaggttgcagtgagcagatgttgcgccactgcactctagcytgggtartagagcgatactccatcaaaaaaaaaaaaaattaatggatgcttttggcaaattcaggactgaaaattgctgtgacttttcctccatgagagtttctgcagtttgggtcataagagttaaatatggttaatacttcattaagtactgtttaactttagcaacctaagacattacatgtcatcaattgttctgactttgtg

SEQ ID NO: 356 - DNA, 401 bp, Homo sapiens
gtaactataaggcagaaagaaaaatggcaacatcagagcataatacgaagattcatgggaaatgggagcagaggagaaggagacccagccttctggggaagacagtgtaggattagagaggaggctgtatttcagctgagactgaggaggggaggtaagacctaccagaaagaagtaccaccaatgtaaacatatcatcaraagtatgttgtgtaatgtatctaagcaatgtagtaaaaaagcgtagtggttaaactttactctcctaggatattgcggtatattttatatttgctatatatagtacatagtagtatacagaatatgtgtatatgtatatgttactacgtaatatacatatactactttccaaatagtatactgcagtacactgccaaaag

SEQ ID NO: 357 - DNA, 401 bp, Homo sapiens
catggtgcccattacttttgcagtctgaggtgtgacagcaaaactggcatgaatttttttcctttttcacaatttcataggtagaagattcatattttactgtaaatcttgaaaacctcagcataagatttttcctttccttattaagttgagaacttacacattttcacttaaaggaagcacttaatggcttctctttcrcagatccaaattatcagcatcactactattgcattttggggctattattaagtgaaataagagtaacttgaatagaagcatagtgataacgcaacagcagatctgataactgagatggctcataagtgactcatgggcagagagtatactgggcaaaaggaggattcatgacctgagtgggatggagcaggatggtgtga

SEQ ID NO: 358 - DNA, 401 bp, Homo sapiens
taaggaaatagagaacttgaacagcactatagacaaattggagccaatagatacagaacactacacccaacagcagcagaatacatattttctcaagtatgcatggaacattctctagaataaatcacatgttaaaatacaaaacaaggcttaataaattttaaaagattaaaatcacagaaagtatcttttttattacartggaatgaaactagaaatcaacagcagaaggaaaactggaaattctacaaatatgtgagttagacaacacgatattcaacaatgaatgggtcaaagtgaaatcacataggaaattgtaaaatatcttgaggcaaatgaaaataaaaacaccatgtgttgaaatgtgtggaatgtaagaaaaacagtgttaagacagaagt

SEQ ID NO: 359 - DNA, 401 bp, Homo sapiens
cagggagcctgaagacaaaattgcaggatggtcccaaccccccagagttcaatcataccacccaagggtattgagctgaaatctgtggccagagctcaagcaggaaggagccccactctcaaaacacagagaagaatgaggcatgggttcctgtgtcagtgtgagtgctagatgttcctccctctgcaaaactggtctggrcaaggtgtagtctgttggccagccacagcttctgtttgagggagccctggaagagcccagtgatctgggcacagaaggttttggacgagtttagctgttcaggcctgctcctgtggcagacactggagggagacctggtagggagatggtgagctgggtggactccacagccatttgctgggctaaaagatcccagggca

SEQ ID NO: 360 - DNA, 401 bp, Homo sapiens
ggcccatattcttaagtgctatctactgtatcaaagcttgaattataccaccaaacaaaaataaatttcttcagcatagaaagcctgtgaaactcaaagcaggaaactagccacaactaaggaacccacacagaactttggccctctgaaagcacccagaaaagaagccaatagattatgcactagaagtaccacagtcargccggatgcagtggctcatgcctgtaatcccagcactttgggaggctgaggcaggcggatcatgaggtcaggagatcaagaccatcctggctaacatggtgaaaccccatctctactaagaatacaaaaaaattagccaggtgtggtggcaggtgcctgtagtccctgctactagggaggctgaggtaggagaatggcat

SEQ ID NO: 361 - DNA, 401 bp, Homo sapiens
aacatttttatatatatcaacagtgttcaagctgagagacaaatgaagaatgcaatctcatttacaatagctataaaaataaaataaaataaaaaataaaataaaataaaataaaataaaatacatctgaccaaagcggtgagagatcggtacaaagataattaaaaaaacactaccaaaagaaatcagaaatgacacaartggaaaaacattccacattcaaggactggaagaatcagtattgttaaaatggacatagtgctcaaagcaatgtacagatacaatgctatcattggtagtttcctatcaaactaccaatgtcatttttcatagaattagaaaaagctattataaaatttgtctggaaaaaagagtccatatagccaaagcaatcctaagca

SEQ ID NO: 362 - DNA, 401 bp, Homo sapiens
ttgggggggtgaagccaagatggccaaataggaactgctccagtctacagctcccagtgtgagcgatgcagaagacaggtgatttctgcatttccaattgaggtactgggttcatctcactggggagtgtaggaaagtgggtgcaggacagtgggtgcagtgcaccgtgcatgagctgaagcagggtaaggcatcacctcwcccaggaagtgcaaggggtcagggaattccctttcctagtcaaagaaaggggtgacagacggcacctggaaaatcaggtcactcccaccctaatactgtgcttttccaatgggcttaacaaatggcacaccaggagattatatcctgcacatgactcggagggtcctatgcccacagagcctcgctcattgctagcacag

SEQ ID NO: 363 - DNA, 401 bp, Homo sapiens
aaggatatccaggatttgaactcagctctgcaccaaacagacctaatagatatctacagaactctccaccccaaatcaacagaatatacattcttttcagcaccgcaccacacctattccaaaattgaccacatagttggaagtaaagcactcctcagcaaatgtaaaagaacagaaattataacaaactgtctctctgaycacagtgcaatgaaactagaactcaggagtaagaaactcactcaaaaccgctcaactacatggaaactgaacaacctgctcctgaatgactactgggtacataacgaaatgaaggcagaaataaagatgttctttgaaaccaacgagaacaaagacacaacataccagaatctctgggacacattcaaagcagtgtggag

SEQ ID NO: 364 - DNA, 401 bp, Homo sapiens
tatccaccatgatcaagtgggcttcatccctgggatgcaaggctggttcaacatacgaaaatcaataaatgtaatccagcatacaaacagaaccaaagacaaaaaccacatgattatctcaatagatgcagaaaagtcctttgacaaaattcaacaacacttcatgctaaaaactctcgataaattagttattgatgggaygtatctcaaaataataagagctatctatgacaaacccacagccaatatcatactgaatggacaaaaactggaaacattccctttgaaaactggcacaagacagggatgccctctctcaccactcctattcagcatagtgttggaagttctggccagggcaatcaggcaggagaaggaaataaagggcattcaatgaggaa

SEQ ID NO: 365 - DNA, 401 bp, Homo sapiens
tatactacaaggctacagtatccaaaacagcatggtactggtaccaaaacagagatatagaccaatggaacagaacagaaccctcagaaataatgccgtacatctacaatcatctgatctttgacaaacctgagaaaaacaagcaatggggaaaggattccctatttaataaatggtgctgggaaaactggctagccataygtagaaagctgaaactggatcccttccttacaccttacacaaaaattaattcaagatggattaaagacttacatgttagacctaaaaccataaaaaccgtagaagaaaacctaggcattaccattcaggacataggcatgggcaagcacttcttgtctaaaacaccaaaagcaatggcaacaaaagccaaaattgcaaat

SEQ ID NO: 366 - DNA, 401 bp, Homo sapiens
ataccacagtgagataccatcttaccctagttagaatggctattactaaaaagacaagcaacagatgctgggaatgatgcagagaaaaggaaactcttacacactgttggtttgaatgtaaattagcacagccattatgaaaaactgtatggagatttttttcaaaaatctaaaaatggaattaccatatgatccaacaakcccactaccaaatatttatccaaaggaaaagaaatcagtatgtcaaagacatacctgcacttggacgtttattgcagcactattcataacagcaaaggtatggggtcaacctaaatgtccatcattgaatggatggataaagaaaatttggtatgtacacacacacacacacacacacacacacacacacacacatacac

SEQ ID NO: 367 - DNA, 401 bp, Homo sapiens
gaaattagaacccttgttcactgttggtgggagtgtaaaatggtacagctgctatggaaaacagtatggtggttcctcaaaaaatgagaaaatgattactatgtgattcagcaagtccacttctgggtatataccccaaagaattgaaagtagggtctcgaggagatagttgaacacctatgttcatattaacattattgrcaatagctaaaaggtgaaagcaacctaaatgtccattgatggatgaatggataaacaaaatgtggcatatgcctatgatggaatattattcagccttagaaaggaaggaaattctgacacatgctacaaatatgggtgaaccttaaggacagtatgccaggtgaaattggccagtcagaaacagaaatactgtatgactc

SEQ ID NO: 368 - DNA, 401 bp, Homo sapiens
atattttcccatttagtaagatattggcttaggatatctatctatctatcttatcatgctaagaaagaaattttaagtttcttttttttttagtgttttcaccaggaatcagtattgaatttcatcagaggatttttcattatctatggagatacataattttttttcttagatttaataatgtggattataataccaatrggttatctaatattggaccaactttgcattctgaaagaaattccacttagttgtgttgtattgatttcacaatgtataagattctgtttgctaatgttttagttggtatttttacatcaatatccataaacatactgctctgtaggtttttttttgtatttttaaaaatttagatttaggtattagtgtagtacttgctt

SEQ ID NO: 369 - DNA, 401 bp, Homo sapiens
taaacatactgctctgtaggtttttttttgtatttttaaaaatttagatttaggtattagtgtagtacttgcttcttaaaaattgggaactttttattcatctttaatgttctgcagcactctataaaacattggaaatatcaaatctttgatgattcggtagaatttttttccaaagttatctgggcaaggtgctttttkgttgatgtttttcttaataacttactttttatcttctatggaaaatgttgtctatctataactgagtcaaatatcatttattttattgccctaagaaattatccatttcctctgttttcaaacctatttgcatagaggtctgcaaaatagtcacgatattttaaatttttgtttcagtggttgtttccccttgtcatctt

SEQ ID NO: 370 - DNA, 401 bp, Homo sapiens
aatttttaaatcagaaatatttagtttatttagttctgtgacttttcctctaaatactaatttcaatacatctttccattattatttttcagaaattttgtcatgtaagtttgtattttccctttaggtagaatgttttctaataaacattttttcttaaaatttgcgtggaagagtctttttgctctttaattctgttarcaatttctagtttttattgcattatgatatttattgttgtgatatttctactttttgaaacttactgatattttctttgtgacttaatatttgattatgttttgtaaatgttttattgcacttgagaagaggtgtattatttactgtatggctgtaagtttggtatatgcttataaagtttggtatatggttataaaatc

SEQ ID NO: 371 - DNA, 401 bp, Homo sapiens
tggaagttagcagcaggacaaggattagcatccagaccaaacattatgtgaataaatgagaaaaataatatcaataaaaggaagtgatattttcatagagaaggacacagaattggacgtagtggctgatatttgtaatctcagcagtttgggaggttgaggtgggaggatcacttgaggccaagagtttgagactagccygggccacatagtgagaccctgtctctacaaaaaaaatttttaaaaatagctgggtgtggtggcatacaactctagtcttagctacttgggtggctaagacatgaggattgcttgaacacaggaatttgaggttgtagtaggctgtgatcgtgccactgcacttcagcctgggcaacagaacaatatcttacatctacaga

SEQ ID NO: 372 - DNA, 401 bp, Homo sapiens
ttctgcctcaaccacctgagtagctgggactacaggtgtacaccaacacacccagctaatatttttattttttttgcagagacaaggtctcactatgttgtccaggctggtctcgaactcccagactcaagcagtcctcctgcctcagcctcccaaagtgctgggattataggcatgagtcaccatgcccaaccaagactrattatttttggaacctgttttaagatgtgttggcattctcaatcaggtttagaatagttgtatagactatacacgaagattcaaaacatttcttaaaatattctatttttagccagtttgcatttaagtactttaaaaagggggcatttcatcagagacaatgctaggtatatttaccttactatatccatggctctatg

SEQ ID NO: 373 - DNA, 401 bp, Homo sapiens
tctgagaggccctaaacgttcagattctaaggtatgcagtgtagtagaccatcttctggatctaaaggactctttcaagggagaacagtagccctgtcaagatttcggggacattagtaaaaatttgcagagagatgttttctacatgcctatgacctggaactatctgtggaagatggtaaacaaagaatgttaatactragtttgttttgtgttacacagtttaaaatgcggtgagaaagccaggtgagactatgaaattttggagctggtgtattacattgtgcatggataagtactgtatttgctcttccaaaccagagatcaggtgaaattatgaagacaaccttttcaggtattatatagggagaaattaaagagaaatttatttgtgtttttat

SEQ ID NO: 374 - DNA, 401 bp, Homo sapiens
gaaagcattctaataagtaatttaaaaaaataagcttcattgagttacaatttacatacaagaaaattaatacaatgaattttacagttagaaatgcataatttgatgaattttggcagatgtggatagtcatgtaagtaccacaaaagtcatgatatagaacatttctatcatccaaaaagagttctttcatgttccacrtcaattaatgtcattgctccacaccttggaccctggtaactaatgatttgttttctattgctataattttgccttttctggaattttatattcatttttttttgtggccagctttttaaacttttcatactgcttttgagattcacctatgttgtatgtattaatagctgatttctttttatgacagagtagtattccat

SEQ ID NO: 375 - DNA, 401 bp, Homo sapiens
ggatttcatcaaaataaaaaacatttgatttttaaagacaccactaataagatataaaatcaagccacagactgggagaaatgattcacaacacgtatatgaagaaagtaacttatatgtagcacaggcaaaaatacagtcatgactcattaataagacaaacactaaataaaaaaataggcaaaaggtatgaatagactyytccagaaaagatatatggatggcaaataagcacattaaaaagtcactagggaaatattaattatgatcmcaataaaatatctctatatacatacatattaaaatggctacaaatggtaaaaaatgaccattccaaatgttggcaaggatctggaggaaatagaactttcataaactagtttgattgtaaaattgtacaa

SEQ ID NO: 376 - DNA, 401 bp, Homo sapiens
gatttcatcaaaataaaaaacatttgatttttaaagacaccactaataagatataaaatcaagccacagactgggagaaatgattcacaacacgtatatgaagaaagtaacttatatgtagcacaggcaaaaatacagtcatgactcattaataagacaaacactaaataaaaaaataggcaaaaggtatgaatagactyytccagaaaagatatatggatggcaaataagcacattaaaaagtcactagggaaatattaattatgatcmcaataaaatatctctatatacatacatattaaaatggctacaaatggtaaaaaatgaccattccaaatgttggcaaggatctggaggaaatagaactttcataaactagtttgattgtaaaattgtacaac

SEQ ID NO: 377 - DNA, 401 bp, Homo sapiens
actgggagaaatgattcacaacacgtatatgaagaaagtaacttatatgtagcacaggcaaaaatacagtcatgactcattaataagacaaacactaaataaaaaaataggcaaaaggtatgaatagactyytccagaaaagatatatggatggcaaataagcacattaaaaagtcactagggaaatattaattatgatcmcaataaaatatctctatatacatacatattaaaatggctacaaatggtaaaaaatgaccattccaaatgttggcaaggatctggaggaaatagaactttcataaactagtttgattgtaaaattgtacaaccacattggaaaacacttttggcagtttctttaaaagttttatacataccctatggcccagtcattccac

SEQ ID NO: 378 - DNA, 401 bp, Homo sapiens
atcaatgaatgttatgaaatttcacaattcattagagaaaaatgaagtttaaatggtaagaatataaactcttaagttaatatgcttaataattaagaacttttgccttggagtagatgaagaaacccaagaattatatattaatttaacgaagagaaaaatatctatttaaagaattgaccattttctaaaattccagarcaacagtgcacataattggatgctcataacaacacagaaaaggatgctcagtctgtgaagttcagtctcaaccagttttgcattttatcttcatctttaatatcaggatagatattataacttaatgctttggtattttcctcaatatttcctttgggagactgaattttttcatagataaaagggaggtatacagatac

SEQ ID NO: 379 - DNA, 401 bp, Homo sapiens
ggcgtcactcggttgcccaggctgcagtgccttagcacaatcatagctcactgcagcctcaagctcttaaggctcaagggatcctcccacctcagcctcctgagtagctgggaccacaggtgtgcaccactgtgtctggctcctattacacagaacattttacttggttttctcactgattttgtgatgttgtcctaattmcatagcgctggcacaaagattatataagcagtagggtactttgtggactcacgtgtggccaggtttgtcccaggatcttcaccctttcactcccttacttgtgactcaccccagcctatacagtgggaagaaattgaggtggagttgaagggattcatagaggtaatgaccccttggattgctggggagggctgtggcaa

SEQ ID NO: 380 - DNA, 401 bp, Homo sapiens
tttgcctttcctggggctgccagggagtacagaatcgggagtgaaactgatcctgagcgagtgcacagtgctccttgatgattactcctccgcaaattcagagactggcgcttactgcttatctggggaattctgaaggcaagggggcagctggaacagccataacgacagcaaaatgagggggtgtccgagagtagcctrctttttttaatcctgtggcatggaaaggatgtgtgactttcccacagatgaagaggatgctgtgaaaggtaaaagctcccttaaaagtttcttgcttcaaaggtggcttgctaaggcaagagaacaccctagtagtaggttgggatgggaggagatatatcattaagaataggtaagggagaatgtcaagaggcgagcac

SEQ ID NO: 381 - DNA, 401 bp, Homo sapiens
ctttagtcttctcttcctctgttctgaccttagagaaaccagaagagtggggtaaggataggaaggaaaagagaaggaacagtccagtttcttctccaccactgcagccctgagttaggggagtagaagagaagctttgaattggatatgaaattaaattttgatttagactggaccagatacctttaatccctgcatggrtgccatcattgatggaatggggcttctttgtatacctgagagaatggggcagctatgggatctgcctgagacaaggactgagagatgcatatccaacaaagcatgcttaaaagcagtgattggagagaagtaaagccatttcctgctaagttcagactgttcagtcaattgattatactgagagagattatgcagtaaag

SEQ ID NO: 382 - DNA, 401 bp, Homo sapiens
ggaatggggcttctttgtatacctgagagaatggggcagctatgggatctgcctgagacaaggactgagagatgcatatccaacaaagcatgcttaaaagcagtgattggagagaagtaaagccatttcctgctaagttcagactgttcagtcaattgattatactgagagagattatgcagtaaagttatttagctgackggtaaagagtctctttggggatggtgtgcccagcgcacaaggttaaggagttggaagatttcttctgtgaataaaatcaatgtttggggctcagtctatcgggaatgacttattactagtactaaaatttgtgtgtgtgagatttaataagtctttaatatggtcttcatttgttgcttcatttattcaaacatttatta

SEQ ID NO: 383 - DNA, 401 bp, Homo sapiens
tttgagcccaggaactcatgctatgctgcttctcataatataaggtatttcctctaatacagaatttaatttagactgtgactaagtttaaagacaagattacaaggagaaggattaatgtgacctgaaaacattggataagacttcagactcatatgttccaatgctcctggaaggccaaccataaatggaaggtgtatytttaggacctggaatgaaagggcacggtagtatcatttcagagtttcagctgtttgtaatatttattataatatcttttttggtcttatcacccagagacatgttctttgcaataaaatagacagcttaatagatttctttaatattatttggagcagacatcataatttcatttagactttaagccttaggagatatct

SEQ ID NO: 384 - DNA, 401 bp, Homo sapiens
attatgtatcctatcacttccagaaacagtttttggaagaaagagagtctaggcctacagcttcttaggaaggcttaacacagggtttttagttgtgctattgtggctcctaggcaaagtgcagaaatgagagagccagtacctgagtcctaaacctccttctgacaacaatcctcttcatgaccctgggaagggcaatcmactttccggaacctttttatcacatatgaaattaaggggtttggactagatatctaggattctttcctggtctaacatttgatgtatttctctatggttcaaagcataacctaatggggaagtttatgacattctaacatggcatactgggttaggagtggatgttaaaatatttatttataccactctttcatcagtaa

SEQ ID NO: 385 - DNA, 401 bp, Homo sapiens
tacagaaaaaactggtgtgaaacttaccagtagggcaagaagttgattacctctcttgttttgatctcttttattacatgtctttgttttgcaggcctctacacttcagtgccctccttgacctagtaataaactctcctccacactgaagccttcactgaaaacttcggaatagaagttggcataaagtatagtaattaygactttcgtggactgaygtgtatgttaaggacttcaaagcatcctactattcagatgtgtggactgtgctaaagtagaagaatctataaaaccaaaggaaaacaaaagtgacaaaactggaggagttttatttttatggagwcagatgggcaaagtaaggtaggttgaatgccacttcagttctaaaagtctatttattt

SEQ ID NO: 386 - DNA, 401 bp, Homo sapiens
tgaaacttaccagtagggcaagaagttgattacctctcttgttttgatctcttttattacatgtctttgttttgcaggcctctacacttcagtgccctccttgacctagtaataaactctcctccacactgaagccttcactgaaaacttcggaatagaagttggcataaagtatagtaattaygactttcgtggactgaygtgtatgttaaggacttcaaagcatcctactattcagatgtgtggactgtgctaaagtagaagaatctataaaaccaaaggaaaacaaaagtgacaaaactggaggagttttatttttatggagwcagatgggcaaagtaaggtaggttgaatgccacttcagttctaaaagtctatttattttctcttggtctgactgg

SEQ ID NO: 387 - DNA, 401 bp, Homo sapiens
acactgaagccttcactgaaaacttcggaatagaagttggcataaagtatagtaattaygactttcgtggactgaygtgtatgttaaggacttcaaagcatcctactattcagatgtgtggactgtgctaaagtagaagaatctataaaaccaaaggaaaacaaaagtgacaaaactggaggagttttatttttatggagwcagatgggcaaagtaaggtaggttgaatgccacttcagttctaaaagtctatttattttctcttggtctgactggaagtgccatctatatagcccaacattttcaagagaaggatgacgatgaaggcttccatggcaaaataatgagaaaattgtcaaattgtcaaaaatcaagctttaggattcaacctttgacactca

SEQ ID NO: 388 - DNA, 401 bp, Homo sapiens
ggattcaacctttgacactcatgattcatgatatgctttctttactcagcagtggtgtgtgttactttaaatgtttagaaaacatacatgtgcatgtatctttatagcagcatgatttatagtcctttgggtatatacccagtaatgggatggctgggtcaaatggtatgtctagttctagatccctgaggaatcgccacrctgacttccacaatggttgaactastttacagtcccaccaacagtgtaaaagtgttcctatttctccacatcctctccagcacctgttgtttcctgactttttaatgattgccattctaactggtgtgagatggtatctcattgtggttttgatttggatttctctgatggccagtgatggtgagcattttttcatgtgt

SEQ ID NO: 389 - DNA, 401 bp, Homo sapiens
tcatgatatgctttctttactcagcagtggtgtgtgttactttaaatgtttagaaaacatacatgtgcatgtatctttatagcagcatgatttatagtcctttgggtatatacccagtaatgggatggctgggtcaaatggtatgtctagttctagatccctgaggaatcgccacrctgacttccacaatggttgaactastttacagtcccaccaacagtgtaaaagtgttcctatttctccacatcctctccagcacctgttgtttcctgactttttaatgattgccattctaactggtgtgagatggtatctcattgtggttttgatttggatttctctgatggccagtgatggtgagcattttttcatgtgtcttttggctgcataaatgtcttctt

SEQ ID NO: 390 - DNA, 401 bp, Homo sapiens
ttcatatccttcacccactttttgatggggttgtttgtttttttcttgtaaatttgtttaagttgattgtagattctggatattagccctttgtcagatgagtaggttgcaaaaattttctcccattctgtaggttgcctgttcactctgatggtagtttcttttgctgtgcagatgtgcagaagctctttagtttaattmratcccatttgtcaattttggtttttgttgccattgcttttggtgttttagacatgaagtccttgcccatgcctatgtcctgaatggtaatgcctaggtttccttctagggtttttatggttttaggtctaacatttaagtctttaatccatcttgaattaatttttgtataaggtgtaaggaagggatccagtttcagc

SEQ ID NO: 391 - DNA, 401 bp, Homo sapiens
tcatatccttcacccactttttgatggggttgtttgtttttttcttgtaaatttgtttaagttgattgtagattctggatattagccctttgtcagatgagtaggttgcaaaaattttctcccattctgtaggttgcctgttcactctgatggtagtttcttttgctgtgcagatgtgcagaagctctttagtttaattmratcccatttgtcaattttggtttttgttgccattgcttttggtgttttagacatgaagtccttgcccatgcctatgtcctgaatggtaatgcctaggtttccttctagggtttttatggttttaggtctaacatttaagtctttaatccatcttgaattaatttttgtataaggtgtaaggaagggatccagtttcagct

SEQ ID NO: 392 - DNA, 401 bp, Homo sapiens
actattcacaatagcaaagacttggaaccaacccaaatgtccaacaatgatagactggattaagaaaatgtggcacatatacaccatggaatactatgcagccataaaaaaggatgagttcatgtcctttgtagggacatggatgaaattggaaatcatcattctcagtaaactatcacaaggacaaaaaaccaaacaccrtatgttctcactcataggtgggaattgaacaatgagaacacatggacacaggaaggggaacatcacactctggggactgttgtggggtagggggaggggggagggatagcattaggagatatacgtaatgctaaatgatgagctaatgggtgcagcacaccagcatggcacatgtatacatatgaaactaacctgcacat

SEQ ID NO: 393 - DNA, 401 bp, Homo sapiens
cacatgtatacatatgaaactaacctgcacattgtgcacatgtaccctaaaacttaaagtataataataataataataataataataaatgtttagaaaaaaattctatcataaatatgaccatttaatttcctacaagtttttcaaaagtttcttcttgggtttattcatccctatggaaaattccttagagagatttargaatcttcagtgaatacttttagaacaaatggaaagaaagcaaaaatgctgtttcatcattgagaaaaataaaactcaaaacaagcttaaccatcaaacctcttctttattccaatttgtcatatttgtaatagcaacaataagctsttcttagaaataatgtgttcttagaaataaataaaatgcatgtttcttactgc

SEQ ID NO: 394 - DNA, 401 bp, Homo sapiens
aagtttcttcttgggtttattcatccctatggaaaattccttagagagatttargaatcttcagtgaatacttttagaacaaatggaaagaaagcaaaaatgctgtttcatcattgagaaaaataaaactcaaaacaagcttaaccatcaaacctcttctttattccaatttgtcatatttgtaatagcaacaataagctsttcttagaaataatgtgttcttagaaataaataaaatgcatgtttcttactgctaaatgccagtgtacaatgaaatttccaagccaattttttggggaaaaggtgtaacttctgtataatgtatttaggatcttaagtggcatatttctgttggatggtttatatgttatctatagatagcacctcactactaaggcata

SEQ ID NO: 395 - DNA, 401 bp, Homo sapiens
agatggggagagacaagactgtcggccccacaccagcaatcactgactcagtctaaacaaagagtaacataataatggtatacaacagagaatcaccgtttaaattttatgaccaggtctttaataagtatcttgcagcctgttatagaaaaacactttcaaatagtgtgatatgtctcataatgggaaaagcgtcccccrgaagtactgagcatccagcaataaaggcatttaagtagacatatcatatgatcaactttaagaggcagtttccaacatgtgttgtcttcattgccggattggaagaaacccgggggcaacgtatcatttatttagcrtaacattgtattttgcataatactagagtttctaaagaattttcatatatactaagctatttt

SEQ ID NO: 396 - DNA, 401 bp, Homo sapiens
gcctgttatagaaaaacactttcaaatagtgtgatatgtctcataatgggaaaagcgtcccccrgaagtactgagcatccagcaataaaggcatttaagtagacatatcatatgatcaactttaagaggcagtttccaacatgtgttgtcttcattgccggattggaagaaacccgggggcaacgtatcatttatttagcrtaacattgtattttgcataatactagagtttctaaagaattttcatatatactaagctattttaatccttgcaagcaycctgtgaaataaagcaaggactctgcttatttaataaataaggaaagaggctcagcatgattcataaattttcctggagtttcaggactggcaaatagcagaattggagtgtgatgccagcc

SEQ ID NO: 397 - DNA, 401 bp, Homo sapiens
ccagcaataaaggcatttaagtagacatatcatatgatcaactttaagaggcagtttccaacatgtgttgtcttcattgccggattggaagaaacccgggggcaacgtatcatttatttagcrtaacattgtattttgcataatactagagtttctaaagaattttcatatatactaagctattttaatccttgcaagcaycctgtgaaataaagcaaggactctgcttatttaataaataaggaaagaggctcagcatgattcataaattttcctggagtttcaggactggcaaatagcagaattggagtgtgatgccagccaattatatccttaaactttacatatattgcccagtgtaaaagttcaagaatgcttatttctttgttatctggaaaggg

SEQ ID NO: 398 - DNA, 401 bp, Homo sapiens
tacttctactgagtagagaaactatgtatttatttatatgtatgttaaaaatgaaaccaacataggtcatttgggagaagaactccttagaataaaaatattttaaaaagtggatttaaatatctgagttagaatatttcactagcactaggggatcgttcttgttgttgtggggtatctataaatcctctgaatgtaggraaagtcttaccatatgtcctgatgtattaagtaagactaggagctttagacaacagagaattaaaacagtgagctgtacttcctctggcttgtatatttatagcaaatgagagcaaaagatgtgattgggcgggttattgcccttgtcaaatataatctattcattcttccggaaatctcctttgcttcgatacctattt

SEQ ID NO: 399 - DNA, 401 bp, Homo sapiens
cacaatatgtatcctcatttacttacatcttctttgatttttttttattatactttaagttttagggtacatgtgcacattgtgcaggttagttacatatgtatacatgtgccatgctggtgcactgcacccactaactcgtcatctagcattaggtatatctcccaatgctatccctcccccctccccccaccccacaasggtccccagagtgtgatattccccttcctgtgtccatgtgatctcattgttcaattcccacctatgagtgagaatatgcggtgtttgatcttctttgatttatttcatcagtgttttatagttttcagtatacaagttagaactattgttatatttattatacctaaatatttttattttttgagtgattataagtgtta

SEQ ID NO: 400 - DNA, 401 bp, Homo sapiens
cttgtatcttgcaaccttactgaactcacttattagttctatgcactttttttatagattctttgggcttttctaaacagaaaaacctgtcatctggaagtagggactgttttctttctttctttgcagtcagtctaccatttatttcgttttcttgtcttcttggactggctagaacttccagtactatattgaataaargcagtgagagcagaaatgcttgccttgtttctgagaatagtgaggaagcattcagtcttttatcatcatgtgtaatgttagctgtasgttttttgtagatactcttcatcaaactgaagttctcctctatgcctgtgtttctgagagtttttatcaggggtaagtattgaattttggcaaatactttttctatatcctgt

SEQ ID NO: 401 - DNA, 401 bp, Homo sapiens
tgtcatctggaagtagggactgttttctttctttctttgcagtcagtctaccatttatttcgttttcttgtcttcttggactggctagaacttccagtactatattgaataaargcagtgagagcagaaatgcttgccttgtttctgagaatagtgaggaagcattcagtcttttatcatcatgtgtaatgttagctgtasgttttttgtagatactcttcatcaaactgaagttctcctctatgcctgtgtttctgagagtttttatcaggggtaagtattgaattttggcaaatactttttctatatcctgtgtagttttccaaacttggaaactcttctgcactctagctgccttcacatgggcaagtgttttcatatcattctgtgttcctctgtat

SEQ ID NO: 402 - DNA, 401 bp, Homo sapiens
atcaggccaggattttactcctggctccttctatcctttgcatagtgagatcatattctctttgagtctgtttcttcatttacaaatagaagaaaaatagctgcagtgatgatcaggtgacttgatagaggaaatgcttagtcaatgtaattggtttatagatagtaattaatgtgagagttttccccagatttttatagwcttcctttatcatttattgctttaccacaataagtcatttgtcaaggaggaacacgtatatttccctagagaacacaccgatwtgagaacatacgaagcctacactcctcattcaggaacaggcaagagacaagtgtacatctagttccaccaagaaaacacacacacacattaacataccagtaatagtaagaaagctt

SEQ ID NO: 403 - DNA, 401 bp, Homo sapiens
aaatagaagaaaaatagctgcagtgatgatcaggtgacttgatagaggaaatgcttagtcaatgtaattggtttatagatagtaattaatgtgagagttttccccagatttttatagwcttcctttatcatttattgctttaccacaataagtcatttgtcaaggaggaacacgtatatttccctagagaacacaccgatwtgagaacatacgaagcctacactcctcattcaggaacaggcaagagacaagtgtacatctagttccaccaagaaaacacacacacacattaacataccagtaatagtaagaaagcttttatggagattctgaaacatctattagaccttgaaagataacttagtatttacatgggaggagacacacttcaacctaccacg

SEQ ID NO: 404 - DNA, 401 bp, Homo sapiens
tgtcaggatggaaagtaggttggtctgatcaagggagtcctgtcatgggaggtgagaagacctgggatctggtactggatttgcttctcactcctaacatgatcatgaaaatattttctgcttccttccttattagcaaaatcaggtagatataaaaggctctgaagcagactgggttgttgtaatggcaaagggggaacytaaaaaattctggactgagatgtgggagtcacaccattgtccactgcagacataccaaacaagccaccttaatttagagcacaggcttgtgagtctagtgatgctgttcaatcatacattttaatctctataaaatgtaatctcctatgcacaaaggtagtaccaatagcacttgagtgcctcgaagagagttttgccca

SEQ ID NO: 405 - DNA, 401 bp, Homo sapiens
tttttgtccttgcgatagtttgctgagaatgatggtttccagcttcatccatgtccctacaaaggacatgaactcatcattttttatggctgcatagtaacagcaggttctggagaggatgtggagaaataggaacacttttacactgttggtggggctgtaaactagttcaaccattgtggaagtcggtgtggcaattcytcagggatctagaactagaaatacacgtatgtttattgtggcactattcacaatagcgaagacttggaacccacttcccacttttgtttcctttaattgcccttatgagaccacatccaaaatcccaagtcctgccaagtgaatgcagtacttaaagatttgactactggatgtctggtcttggagaaaacagtcaagag

SEQ ID NO: 406 - DNA, 401 bp, Homo sapiens
aagccaatgtgcagaaggccttgtttcactacccctaaaacagtgcatgtgcaggaggactgttattgctgtgctttggaaggtctgtggatgaggaaatgtagaattgcagatttatgggttggaagttgatttagaagacacatgtaacagaagtaacaatcttatcagacttaccagtgtcttccacttatttccttwacttcagatgctcaggaacgacagcacytgcagaatgcatccactgctgaaaaatgagagctgtttcttgttggtactcttcagggacattttagcatagtggtggactccagtgttgacttttcttttcatcatctgtttgatcttggtggattcttaagaatctctggacctgagtttgttcatctgttgattggggt

SEQ ID NO: 407 - DNA, 401 bp, Homo sapiens
ctacccctaaaacagtgcatgtgcaggaggactgttattgctgtgctttggaaggtctgtggatgaggaaatgtagaattgcagatttatgggttggaagttgatttagaagacacatgtaacagaagtaacaatcttatcagacttaccagtgtcttccacttatttccttwacttcagatgctcaggaacgacagcacytgcagaatgcatccactgctgaaaaatgagagctgtttcttgttggtactcttcagggacattttagcatagtggtggactccagtgttgacttttcttttcatcatctgtttgatcttggtggattcttaagaatctctggacctgagtttgttcatctgttgattggggttcatggtagccacttctcaaggttatga

SEQ ID NO: 408 - DNA, 401 bp, Homo sapiens
ccttacttccttcagattttcgctcagataccatgttattcatgaggcttccctggccaccccatttaaaagcagcaccccaccagcattgcctatcacccccaccctgctctgtattacctgataacactaatgaccgtctggcagattatatctttatttgcatatttattatctgtattctgtctttagaatgaagayagaggctttattccagtgactgaaacaatgcctgacatgtaatggaactcaataaataattgttgaaataatgaatgaataaatgattagcctttaatttgtattcattcgtacacattacattggggttttctagaagacagtatgaaaatttcacttaatttgtgactcaagtacagaaagaacgatagagatcagag

SEQ ID NO: 409 - DNA, 401 bp, Homo sapiens
gtaaagataaatgtaattgtttttgaaatcaaccacttgtccctaatgctcaatctgtgcttctgagaatttgccgagtttcaatgctttaatgtgtgtattgaacagggctttctgttgcaaatagcagaatttgcacacgctagttgaatcagaaaacaataacgtaacaacagatactaataaacacgtagaatctcrgagagtgccaaagagcagggttctggggctacacagccacaccttaggacttctctctaatcatatgacttctcagcacctgtgatgccaggacttggcctcccaaagctgaggaaccaaatgcctcaccaactgctcctgccagaaaactggttctccctggtttggtgcccatactctttgaattttctggctttaaa

SEQ ID NO: 410 - DNA, 401 bp, Homo sapiens
ggatttctgttgtccttcaatcaaccatctacctaagcctcaaaccgttttgttttgcttaaaaacagaatgagtttggcaaacctagaaaagtacacaaaggatcatccatggatataggatggaagatgtatgaatatggaccaacaacagtgtttattttaataattctaatattgttataagttgtcataagcttaytttcgtaattagagaatagtcttcaatttacactgaatgcatgtttggcaaatatactaatgttatatatgtacttctcttgttcagggcagtcacttgttttaagtaacatgtttatctttattaaaatatgaatttcatgcggttttacagcaaggttattggttaaatcaatattctcaattaatgaaactagtgac

SEQ ID NO: 411 - DNA, 401 bp, Homo sapiens
acacgtggaggatactagaggctgccatgacaatattagccaaaaaatgataaaccacaacgtgatagaaggaagaatcctcactttatagttgagccccgagtaagtgaggaaagttgtgcaagtttgtaacttcagtgtgatggttgaggatggaattaaagtctcctgactgcttatgaaacctcccacctatatgtktttacgcaaaatgtcatggcccttacatccttttgtttccattgctatgatggttctggattgtaatcctataagaatatgatcacttaatgaatttatgttcattatatttcatatgcagcctgaaatgcctctggtttctttattagcaaatcaacagaaaacacttgataaccagattcaagattagacagcaaaga

SEQ ID NO: 412 - DNA, 401 bp, Homo sapiens
agggatcttaagaaatttttttagaaaggatatgggaccctaaaactattgaagtaacaagaaattaggacaagaaactaatatgggaccctaaaactattgaagtaacaagaaattaggacaagaaactaacagtgatagaggaagggtactggcttgttagatttgggctcaccgtttggcaatccatctctaaacccyatcacaacttatttataataataatcttggtgctgatcatcataatctgggtatgcagatttacctacataattttaggcaaattggttaacccctctggacatttaattcctcatctgtgaaggagttacacaagaatacatttattggtttaaataactactgttcaatagagaatttttaaattagcatctgtagct

SEQ ID NO: 413 - DNA, 401 bp, Homo sapiens
tttcttgtatctctgtcactcacaatattacctaatgctatctaatgtattctgttcttagagaagtaaaatgtctcagtagaccaaacttagatttgatcattacgaaagatgtcattctcagtggctggatcttcatgaggttttcttgagctgtttttcatttcacctgctgctggatgttttaggctgctgtattcrcatctggtggcctgtctcactaggatctcatggctgcccgggcagtgtcacagctctgagttcaggttggctctagtcttgcccttcgctacagaatcgtggaatacagtgggagatgaagaaggcagcactcttgccctttgtgtttctagtaacttaaattcaactcctggcagcctacttcacattctgatttgggc

SEQ ID NO: 414 - DNA, 401 bp, Homo sapiens
acacccatgtaattcacaggcatctgtccacaggtagtttgagaacctaactatattaaatttcaatattcagcaaatagctcataaccaatcatatctgaattagaaaagcatgtgtaaagaacaatagcaccaactagcactcatagcagattattccagctatgttataataaggcccttggcaataactcaaggtckgttttttcaaaatgtaaggattaggtgttcttgaggcaggaaagaaaaacaagactattctttgcagatggagaaaaaaatgaagtagattcactagcagagtcactttcatggaaatttggagctctgctgcacagttttagtgtttaaacaggattggaagtcctttgggatgacattttcaatgctgaaagagaaac

SEQ ID NO: 415 - DNA, 401 bp, Homo sapiens
ctgattttggtaaaactaagcacacaatttaaatttatcttggaaaaccttagtagttattggaattacttgagaatctattgcaagcaatctaaatgaattcttccaaaacatgtcactggagcaggtactcaagaagtaatctgaagtaaacaaacaaaaacaaagctatatttatccttcctcttttctgtgtaatayaatccatgggaagacaagaagaaatttattttctacttgtgagatttggggatgatgatgctttttctatccttatcaccatttgtcaagatacaactttcattactttccagtaccacctttgaacagcatcttcttttttagtatattctcccttcctccttccatctctccattctttcttccctcctcttttcttc

SEQ ID NO: 416 - DNA, 401 bp, Homo sapiens
caggtgctgcaataaattgtttgccctagatcgaggtggggagagagccctcttaggatgagctgtcacacagtaaaagataagatttcctggatcagttttctaaagtgacaggcgtgtcccctaatcgagacagacagtgctccattttgacaaataggccagacttctacgtgtgcatatttgttttgtgtgtgtcasagtgagggtgaggttgaggagtcattctgttcttattggaagtgaatcaggcataaaagtgatagagcgcttgaatgagatgattgcagttgaaagacacagcaattaagcagatttcagactttagagagcatgtcttccgggagctatccacggtactgaactgcttctccctatattgtcctgtaaccccgcaaaac

SEQ ID NO: 417 - DNA, 401 bp, Homo sapiens
atagagcgcttgaatgagatgattgcagttgaaagacacagcaattaagcagatttcagactttagagagcatgtcttccgggagctatccacggtactgaactgcttctccctatattgtcctgtaaccccgcaaaacaaaccttcaaacattttaaaaccacaagacattttaaaaactggctttggttattccttackagacaaattctctaacctgtgtatttctaatacttgttatttgtttaatcttggctaggtcarcccatttttttttgtttgatattacacattcatccatttatttattcaacaaatatgtaggtacaatcttccgtatgttgggcagcctcctagtggttaaggtgcttaggtttcttattatgtaatgctaattatta

SEQ ID NO: 418 - DNA, 401 bp, Homo sapiens
tagagagcatgtcttccgggagctatccacggtactgaactgcttctccctatattgtcctgtaaccccgcaaaacaaaccttcaaacattttaaaaccacaagacattttaaaaactggctttggttattccttackagacaaattctctaacctgtgtatttctaatacttgttatttgtttaatcttggctaggtcarcccatttttttttgtttgatattacacattcatccatttatttattcaacaaatatgtaggtacaatcttccgtatgttgggcagcctcctagtggttaaggtgcttaggtttcttattatgtaatgctaattattattacttttgatttttctgggatttactctaaggaagcagatttaatgattaaaataattctac

SEQ ID NO: 419 - DNA, 401 bp, Homo sapiens
tggaggataagctcctttcctagagatacttactctacttttggtcatggaccaaatttggagttattcctgtggatttttttctcttgttccttaaggcagtgatagatgcttgtttagtcaccataagttgtgagaatatgtggtctcaataaagacccagcaataccttgtttttctactcattatccagccccaaartttaagatctaaatgtttcctggtgagaatacaaagaaaagtgagctcttatagcctgttgatgggaatgtaaattagtgcagccattatggaaaatagtagagaggcttctcaaaaggctaaaaatagaactaccatatgatccaacaattgcactattgggtatttatccaaaggaaacaaattcaggatattgaaga

SEQ ID NO: 420 - DNA, 401 bp, Homo sapiens
cactgattttaacacacattggaaatatgcataggcaaaccccaaacaactttttattcaatagtgtccatgtatctctaaacttttgatagaaatttgttccaataatggggttactacataagttgaagaaagtcaaactgaagcaaaatttgaaggcttctatattaatgatcagttttaggcgatacttgccaaaayctagttcaggattagaataggctgtgttgacattttaagtgagacatatcagttactctttttcagaaagttaaaataaattctcataatgaaaaaataaatgataattttagattcttttagagaatttactacctttacaaattaggaaaataatattcacagtatccatgattccaaccagttaacatgttggtata

SEQ ID NO: 421 - DNA, 401 bp, Homo sapiens
agctgggactacaggcacctgacaccacgcccgccaatttttttgtattttttttttttagtagagacggggtttcaccgtgttagccaggatggtctcgatctcctgacctcgtgatccacctgcctcggcctcccaaagtgctggggttacaagtgtgagccaccgttcccggcctctccagtgtcctatctcaattcytattcaattgtttgttaactagattggaatcatactgtgcatattgttttataatttgctgttttggctgacatttggaaaaattattttagaaaaaacagccagttttgtagatgaaatggtgttttgtttctattgatttttgatttttaagttgctattacttcatgaagttagcgtctttcttgtgtattggctat

SEQ ID NO: 422 - DNA, 401 bp, Homo sapiens
actggaaaactaattgttcagcatcctaagtgtatttgttgcttaattatatatataatttctacaacaagtggaatgatttacatgaatgtcaaataactggtttataaatgaaacctgatattaagctaaataaaatattggcatatagtgttcacttatgagctaatattcttacctctagcttcatttacaaattarttatgctacaaatatattaatgttccacaactctttcacacttccatcaatatcgagtttattccattacaatgtgaaattaaaaaaaactgtagaataattacttctgcttcagaaaatatagattacctatcttccagtaagatgctgcaatttatttagataactgcatttattgcattgattttgaaaaattgctc

SEQ ID NO: 423 - DNA, 401 bp, Homo sapiens
ttaatatacattaagagttttatttttggaacaacttagtaatttttagaaacttgagtacaagtgttggcaaaggttctataaaattctgtctacagaatatgtggaacacaaccttgggtcgtatctccaaggaaaactaccatgattaaaaagacaatgctttgtcaaattcacttgttatcacaatctaattgtgtwaaatgccggccacattytgagtagacactttaacttggcttyccttgggaaataggaaatgaagggcccgaaagaactagaagctgcctctcaattttytttcaacatggcaaaagcatttgcatttatctgtgcccctctcttggctacactctcagctttgatacactacttgagcatgtggaggtttacctactgaa

SEQ ID NO: 424 - DNA, 401 bp, Homo sapiens
ttttatttttggaacaacttagtaatttttagaaacttgagtacaagtgttggcaaaggttctataaaattctgtctacagaatatgtggaacacaaccttgggtcgtatctccaaggaaaactaccatgattaaaaagacaatgctttgtcaaattcacttgttatcacaatctaattgtgtwaaatgccggccacattytgagtagacactttaacttggcttyccttgggaaataggaaatgaagggcccgaaagaactagaagctgcctctcaattttytttcaacatggcaaaagcatttgcatttatctgtgcccctctcttggctacactctcagctttgatacactacttgagcatgtggaggtttacctactgaatgtgacccttatatgaa

SEQ ID NO: 425 - DNA, 401 bp, Homo sapiens
tttttagaaacttgagtacaagtgttggcaaaggttctataaaattctgtctacagaatatgtggaacacaaccttgggtcgtatctccaaggaaaactaccatgattaaaaagacaatgctttgtcaaattcacttgttatcacaatctaattgtgtwaaatgccggccacattytgagtagacactttaacttggcttyccttgggaaataggaaatgaagggcccgaaagaactagaagctgcctctcaattttytttcaacatggcaaaagcatttgcatttatctgtgcccctctcttggctacactctcagctttgatacactacttgagcatgtggaggtttacctactgaatgtgacccttatatgaataatatgagacttttgtatcaacag

SEQ ID NO: 426 - DNA, 401 bp, Homo sapiens
atatgtggaacacaaccttgggtcgtatctccaaggaaaactaccatgattaaaaagacaatgctttgtcaaattcacttgttatcacaatctaattgtgtwaaatgccggccacattytgagtagacactttaacttggcttyccttgggaaataggaaatgaagggcccgaaagaactagaagctgcctctcaattttytttcaacatggcaaaagcatttgcatttatctgtgcccctctcttggctacactctcagctttgatacactacttgagcatgtggaggtttacctactgaatgtgacccttatatgaataatatgagacttttgtatcaacagtagtgatggtttttgtttttaagtcacattttattgtatgtcttctctacctctcac

SEQ ID NO: 427 - DNA, 401 bp, Homo sapiens
cgttatatggaaatgtgacatgttttagatttgtgtaagctcatgtacttgaaaatcagacttgtctaaaatttcttttgtaagatattagagaacttttgaattatacctcttatttttgaatgtacattcctcagagaatcatctttatgcacaaataatgtttattttatatttttaatctactttagcagacccacstgattcttctacatgtaaggttgaaacagttttgagtgataaagaactgattttatggagcaactaatgattttgctgttgctacttttgtgccagcaaatacgtaatccacaagaatgttataagaaagatatttatcaagcctctaaaaaaraagaaagtaatcaaaagataaggatgcataaatatcttaagactac

SEQ ID NO: 428 - DNA, 401 bp, Homo sapiens
caaataatgtttattttatatttttaatctactttagcagacccacstgattcttctacatgtaaggttgaaacagttttgagtgataaagaactgattttatggagcaactaatgattttgctgttgctacttttgtgccagcaaatacgtaatccacaagaatgttataagaaagatatttatcaagcctctaaaaaaraagaaagtaatcaaaagataaggatgcataaatatcttaagactactcatgacatcaaggaaggtgaatcagtattaataattcactagtttgtgcatacttattgtcaggtgctgggtcaaattaaattggaatgatttgttgacatgaggatttctgggttcatgatggattcacattaaaacaatttttatgtttta

SEQ ID NO: 429 - DNA, 401 bp, Homo sapiens
caaattaaattggaatgatttgttgacatgaggatttctgggttcatgatggattcacattaaaacaatttttatgttttaagccttctcccatcaaataggttttacggtcttgtgtacacattacatgagggaaatagtactttaacattttacatgctggtgtatagtctatatcagcagtccccaacctttttggcwccaggaaccagtatcatggaaggtaattttgccatggagtggggttggggaaaggagatggtttagggatgaaaccgttccacctcagatatcaggcattacattctcataagaagcatgcaacctagatccctcaaatgtgcagttcacaatagggttcgtgctcctatgagaatctaatgctgccactgatttaacag

SEQ ID NO: 430 - DNA, 401 bp, Homo sapiens
agcagtttataaatggaagaaatggctttacatatcttgtttcctgaatccctttggatattttaaaagaggtgattaaagtaaatttatgtttctgcagatgcatgtaaagctaattgttttaataacagtataattggcgaaaggaagttatgtgtaataagaaacaaagcgtaccacttccaaaatattcacattagrcatttgttaaatttgcagtgagtttcagcatacacacatacacaacacagaccatatgtgaacattaggaagattgatttgtttaaaaaatccacttctacaccacataagtaatatttcttactgagagtcactgaagtgaggaagaaaaataaccacataaygggaaaagaaaaacattaaatttagttatattgtat

SEQ ID NO: 431 - DNA, 401 bp, Homo sapiens
aaacaaagcgtaccacttccaaaatattcacattagrcatttgttaaatttgcagtgagtttcagcatacacacatacacaacacagaccatatgtgaacattaggaagattgatttgtttaaaaaatccacttctacaccacataagtaatatttcttactgagagtcactgaagtgaggaagaaaaataaccacataaygggaaaagaaaaacattaaatttagttatattgtatatgttttgtgtttattagtttttattaattgtaggcatgcaggtaaaaaaatcgcctcatttgaaaattaataacccagggcacaaactattaattaaggcatatagcaaatgccttttaaaagtattttatactggctgggcatggtggctccgcctgtaatc

SEQ ID NO: 432 - DNA, 401 bp, Homo sapiens
atgaccatacgtaggaacctgcttcttctcttgaaatggctgttttgttttatggagattggctagactggcaggtgacaaggcaagaggtgggctggccacgagagccagctgagcagtgcgagttggtgtgattcagccatttgtcaccaccatattctgccatagatagatattttctattcgagaaagtggatcaamtttcactgtacaccactttctcactakgstagaaatacatgaatggtggggcatagttcactccaaatmtgatccatctaaacttttctttctggtgagttgatctgttttgagattttacactttacataaaaatagtatagcagccactctttgccagtcacaaaccacctttagctgagagtattatcatatcaatt

SEQ ID NO: 433 - DNA, 401 bp, Homo sapiens
ctcttgaaatggctgttttgttttatggagattggctagactggcaggtgacaaggcaagaggtgggctggccacgagagccagctgagcagtgcgagttggtgtgattcagccatttgtcaccaccatattctgccatagatagatattttctattcgagaaagtggatcaamtttcactgtacaccactttctcactakgstagaaatacatgaatggtggggcatagttcactccaaatmtgatccatctaaacttttctttctggtgagttgatctgttttgagattttacactttacataaaaatagtatagcagccactctttgccagtcacaaaccacctttagctgagagtattatcatatcaattgtttcaaggaaatgacaaatgagtagt

SEQ ID NO: 434 - DNA, 401 bp, Homo sapiens
cttgaaatggctgttttgttttatggagattggctagactggcaggtgacaaggcaagaggtgggctggccacgagagccagctgagcagtgcgagttggtgtgattcagccatttgtcaccaccatattctgccatagatagatattttctattcgagaaagtggatcaamtttcactgtacaccactttctcactakgstagaaatacatgaatggtggggcatagttcactccaaatmtgatccatctaaacttttctttctggtgagttgatctgttttgagattttacactttacataaaaatagtatagcagccactctttgccagtcacaaaccacctttagctgagagtattatcatatcaattgtttcaaggaaatgacaaatgagtagtta

SEQ ID NO: 435 - DNA, 401 bp, Homo sapiens
ggcaggtgacaaggcaagaggtgggctggccacgagagccagctgagcagtgcgagttggtgtgattcagccatttgtcaccaccatattctgccatagatagatattttctattcgagaaagtggatcaamtttcactgtacaccactttctcactakgstagaaatacatgaatggtggggcatagttcactccaaatmtgatccatctaaacttttctttctggtgagttgatctgttttgagattttacactttacataaaaatagtatagcagccactctttgccagtcacaaaccacctttagctgagagtattatcatatcaattgtttcaaggaaatgacaaatgagtagttaccaaaaaaagaatgaatgaatgaataaataaataaacaca

SEQ ID NO: 436 - DNA, 401 bp, Homo sapiens
tatgcccagtaaatttttcataatttgtagagacagagtttcgccatgttgtccaggctggtctcaaactcctggactcaagcagtctgcccaccaaagcctcccaaagtgctgggattacaggcatgagccatcgtgcccaaccatagattttttttttcataatggcagagaatggctgcaatttagggtctttcttargttcttcctcatccatttcttgcagaaaatttagtactttgtatttctttcaataatttcaacaattttatcctgacttttcccagagcaaaaattaggatggggatgttagagcttcctttgagcaggctatcatcgcaatgaaatcttgaccttgccccttgtagttgcctattgctttataaaacttgttattgaaa

SEQ ID NO: 437 - DNA, 401 bp, Homo sapiens
ctcaggagttcaagaccagcctgggcatcaacacaagaccttgtctctactaaaataattttctaagaatagctggatatggtggtgtatgcctgcagtccctgctgctctggaggctgaggtgagaggattgcttgagcccaggagactgaagcttcagtaggctatgatcacatcactacactccagtctgtgtaacaraatgagatcctgtctcaaaaaatttaaaaaataaaatgaaaaagaagatgctacgtacattatacacatataaattagtaaccaaatggtttaacaacctcagtgattgtgttgttctgtagtttgatgacttttatcttgctccttctcattgccattgattgtaccaggttatttcctggagcatgttgtatatcaag

SEQ ID NO: 438 - DNA, 401 bp, Homo sapiens
tttacataaacagatatgccaatctttccttttatagcttctggttttttgagtcaaaaattgagagaccttcctcattctgagagtataaaatagtaattatttttaattttaattaatttatttttattgacacctaataattttgcatgtttatggtttaccatgtgatgtcctaatacatgtacatattgtgaaatratcaaatcatggtaattagcatatcaatcaccttaaacatttatcattcctttgttgtgagaacatccaaaattctctcttctggctgcttgttggcagtagtcaccttactgttcaacagagtactagaacttattcctttctatgtaactatatctgctgaccaacctcttcccatctcccactccctcctattctcc

SEQ ID NO: 439 - DNA, 401 bp, Homo sapiens
atgactggtttatttcatttatcataatgtcctctagcctcattcacattgttgcaaatggcaggattttatcctttttgtggctgaatagtattccattgtgtatatgtactgtgttttctttatccattcatcccctgatggacacttaggtggattctgtatttcactattgaaaatactgctgcaataacatgagcrtgcagatgtctcttctatatactgatttcctttcctttggatatatacccagtaatgggattgctggttcatatatttttaacattttgaggagcttccatactgttttccacaatggtagtactgatttacattcccacgagcagtgtataggagttccctttcctttacatcctcgccagcataataacgattttaat

SEQ ID NO: 440 - DNA, 401 bp, Homo sapiens
aataacagctaatgttcattgagtgctaatcttccaggtactgttcaaagagttttacctattatcaactcaattctcccaacagccatatgatgttgttactgttattatagataaagccacttaggcacaaagagattaagcaactagttcattgttacagagttggaaatggaaagccaggtcctaacccaaatgctstgttgcgcacttctctgctgtctgcaggtgggatgagaggtgggtgctgagctgcctcctgtggtgctgttttgaaacctgcccatcccaaagctaagggagtatcgctgtgctaaagggttcagtcagcagccttgccagttcggaatcccctagaaccaccctccatgcatgtcatgggcagctctctgagatttctg

SEQ ID NO: 441 - DNA, 401 bp, Homo sapiens
ttaccttataacttgatttcagaatatagttacacaaagtgagaataactcgatgaggatgctgtttggatcttgagtactgtaagtcctgtggtttaattgacgagttgatggatttcttttatgcctaaattcaggctgaaaggcctaaaggccacacgaggcagtttatcacgagcgctattctccgtttttatattmtggttcattaccagccccttcctcagtacttctatttatataatgttgttctggtcaaggtttatactaaatctcttttaacttcaacatccaacaaatatttttaaggactaatgtgtgcaaaacattatgctaggtgtttcctaaggcttcaaataacttggatgccagttttggactgtaagtgctcacaggataat

SEQ ID NO: 442 - DNA, 401 bp, Homo sapiens
gaaacagatccctatgccaaaaagttggggattgcagctttaatagactcagaggcatagtcttagagtgtaacaaatgcacaaaccttttcttttaaaacagactccagagggattgaagagagggaaccagtgataatctatatgcccatttcatggcagacatgctgctgtgtgctttccatgcattatatcattcakccaacaggcatctaaagaatatagagtcaagaacagttaagccattgccacaagatcacctagctagtaaatggctcaaactcagtgactcaaacccaggatttccaaccttaaataaggctctcactcccacaccgcacagctgcatatctgagtgtttatcagtgaattacattgatgtaaattcatttatgaaaatg

SEQ ID NO: 443 - DNA, 401 bp, Homo sapiens
tcttgaggcttctgcattcttcacgtagttctcgagccttggtttttagctccatcagctcctttaagcacttctctgtattggttattctagttatacattcttctaaatgtttttcaatgttttcaacttctttgcctttgatttgaatgtcctcccgtagctcggagtaatttgattgtctgaagccttcttctctcmgctcgtcaaagtcattctccatccagctttgttccgttgctggtgaggaactgcgttcctttggaggaggagagtcgctctgctttttagagtttccagtttttctgctctgttttttccccatctttgtggttttatctacttttggtctttgatgatggtgatgtacagatgggtttttggtgtggatgtcctttctg

SEQ ID NO: 444 - DNA, 401 bp, Homo sapiens
ccccctgctttgtttacctaagcaagcctgggcaatggcgggcgcccctcccccagcctgctgccgccttgcagtttgatctcagactgctgtgctagcaatcagcaagactccgtgggtgtaggaccctctgagccaggtgcgggatataatctcctgatgcgctgttttttaagccggttggaaaagcgcagtattcakgtgggagtgacccgattttccaggtgccgtctgtcacccctttctttgactaggaaagggaactccctgaccccttgggcttcccgagtgaggcaatgcctcgccctgctttggctcgcgcagggtatgcgcacccactgacctgcgcccactgtctggcactccctagtgagatgaacccggtacctcagatggaaatg

SEQ ID NO: 445 - DNA, 401 bp, Homo sapiens
tcaaagtcaaatggaacctggaaaatcgaacttaattccattttacatttttcccttgaccatttcccatggtggggaggtatgtgtctagatttggaaaataagcctgcttagttttttttcccagctcagtgcttagaaacaaccccctctagcaaaaccatgcctaggaaaacaaagtatccagctaggctttcaagrttacttgggggcaagacatggatagttacgtccttggaggaaaataaatacaaggcagtagatccaaatgtatttgtcatgcaaagaacattagctgagagagagcttccatatataggtttgcaaaactgagagcaaagccaaagccattcctgggttttgctttgtgatatagtctccaaatggatactattatgatt

SEQ ID NO: 446 - DNA, 401 bp, Homo sapiens
aaagcagtcattcaatcactcagtaatttttagggatttttaaaatagatataacaattttaggatgtcaagttttagatgtctagttttaacttgtttggttgagctgacatttaagttcagtcccaatgtgatgtgaatggacctagccttttacctcttctttttttcctcttcattggaaaccagtacagagaacayggtcacttaataagaaagatgtttcctgctttgtttccttttattcaactcagaactgcctgggggaaaagattgcttcctttctgaatgtggtaagccacaaaatggaaaatgtgcacacgagctctttcctattaaccttggggaaaggtgacagaaatgtgtgaacaatgctgttagctgtttaaatgttcttttat

SEQ ID NO: 447 - DNA, 401 bp, Homo sapiens
taaaagataatttggccaactgtattggaccaactgctcttgaactctctaagtacaattggtttaagatattgcctgaaatgactattttgcttatggtgtcattctttcatggtcaagatgacagttctctaggaatgttatttcatttctagaatgtcagccaaacagctttttatgatcctgagcagttatactctwmcatcccaaacacacacacacacacatacatcttacacacacacacacacacacacacacacacacacacacacacacacaaataagccctgagaattttcagagaaattcatggtggaagatctgagattagaacccaggaactcctaagattccttggttttgtatcaaaggtcaataaagagacatgaagtcaatga

SEQ ID NO: 448 - DNA, 401 bp, Homo sapiens
aaaagataatttggccaactgtattggaccaactgctcttgaactctctaagtacaattggtttaagatattgcctgaaatgactattttgcttatggtgtcattctttcatggtcaagatgacagttctctaggaatgttatttcatttctagaatgtcagccaaacagctttttatgatcctgagcagttatactctwmcatcccaaacacacacacacacacatacatcttacacacacacacacacacacacacacacacacacacacacacacacaaataagccctgagaattttcagagaaattcatggtggaagatctgagattagaacccaggaactcctaagattccttggttttgtatcaaaggtcaataaagagacatgaagtcaatgaa

SEQ ID NO: 449 - DNA, 401 bp, Homo sapiens
tgatctcctgacctcgtgatccacccgccttggcctcccaaagtgctgggattacaggtgtgagctactgtgcccgtccttgttttccttttgtcaagaaagccagacattctgtgacacggtaaatgaaaaagggcttggacccaaccccagctctgttgcttgcttgttgcgttgccataagagaccctcaagaagaayctcacaaaatccactgccctcccttagtctcgctttcccactaaatcgctccatgcaaggggagccatttatattgcattaaacttttctcggtgttctctaattccaggggttcttactgcctgagagggtcactccaccatgtgggtaagcggggtgtccagagtctgcccataggccatcagcatcagtttttcaaa

SEQ ID NO: 450 - DNA, 401 bp, Homo sapiens
tggattttgatgtaggttagagactgtttataatcatcggagcctagattttattttacttaaatcgcagagtactgtttttgctattttaatatgctgtaagttttcccagaaaacaacttgtataaattgacaaaacttattttgttcagaatttttccaggagatgctcaatatttcagaaaacgacctatctaaagrcaatagtgtttgtggcatttaagatagaaataaagtacaaaccgtcagtctgcatgcaaactgtagttactgtattctcacgattctaattatgggtgcaggcacccaggactttgctatgttttcaaatatagtttttttctattgctatatatggaaattcttataattttattctgaattaataaccttacatcttt

SEQ ID NO: 451 - DNA, 401 bp, Homo sapiens
catgaaagtggcatcctgttggcggagcttgcagtgagccgagatcgcgctactgcactccagcctgggcgacagagcaagactccatctcaagaaaaaaaaaacaaacaaacaaaaaaaggaagtggcatcccattatctttgctgtattccattggtgacaagtaaggtatagattccacatgtactcaaggggcacgyattacacaagggatgaccactcacctgcaaggataattgaggaacattttcgattctgttcaacacagccaatttcctatagcagtgttaggtggaggggatgagttattgggatcagaaggtagctagtgtgttctgtagtctttattccaatgaaagataactttacccattaatgtgaagtcaattgtactcagaga

SEQ ID NO: 452 - DNA, 401 bp, Homo sapiens
gatccagggtcagatctggaagaggtagagagcatttttttaattccttatttaaaaaatgtgatttttgtgggtcatgtgaaggtttgttataaagataaacacgtcatgggggtttgttgtacatattattacatcattgaggtattaagctcagtacctggtagttatcttttctgctccgcttccctcctcctaccstccaccctcaagtagacctgagtgtctgttgtttccttctttgtgttcctaagttcttatcatttacttccctcttataagtaagaacatgcagtatttggttttctgtttctgcattagtttgctaaggatgatggcctccagctccatccatattcccacaaaatatatgattgtgttcttttttatggatgcatact

SEQ ID NO: 453 - DNA, 401 bp, Homo sapiens
ctgagagcatttaagagtcaaatgtattcatgacataaatgtgtattgaaaatctgatatgttttagtgattgttttatagggagggggcagagactctgcttttatgaagcttacagtgagtgccagccaccattttagcttttgggggccttctctaagaagggtggagtagttaatgtagacaaacatgggttttggmagcatacgaccatgaattaacattatatttccgcttaccagccgtgtgattttagcttacgaaagctactctctggttgtttatttcttcaagtgaagaaatgggtctaatagtacctatcacacaagattttctgtgaagattttgtgagatcctrtatattaagcacccagtgcataggtgttctcaatgttaaatcc

SEQ ID NO: 454 - DNA, 401 bp, Homo sapiens
taagaagggtggagtagttaatgtagacaaacatgggttttggmagcatacgaccatgaattaacattatatttccgcttaccagccgtgtgattttagcttacgaaagctactctctggttgtttatttcttcaagtgaagaaatgggtctaatagtacctatcacacaagattttctgtgaagattttgtgagatcctrtatattaagcacccagtgcataggtgttctcaatgttaaatcccctctccatgtctgaaccttcaataaaacagactattacaaattacatatgaagactttgatgtttaacgtcatccacacaaagttaggcaaaagtcatatataacaaatatttaagtaatcacctggaacaagatctctttagttattttttaaat

SEQ ID NO: 455 - DNA, 401 bp, Homo sapiens
agtcagcagccatcaacatcaagggaagaccctccaccagcaaaaagattatgactttctgaagattcagatgatcattagcatttttagcaataatgtatttacaaattaaggtatgtacatttttcagatatgttattgcacacttaatagactacagtatagtacaacttttgtatgcactgggaaaccaaaaaattyaggtgacttgctttattatgatgttcactttattattcagttcactagaactgaacctgtaatatccctaaggtatgcctatgcttgaaaaatgttatcagtaagatgtgtaatgtgtgacaaatccagataatacattacttttggagaagctgagctgtttcaaaagtgttccttttatttgaagaagaagcagagta

SEQ ID NO: 456 - DNA, 401 bp, Homo sapiens
tgtgtgacaaatccagataatacattacttttggagaagctgagctgtttcaaaagtgttccttttatttgaagaagaagcagagtagcccaatcaagtaattttatttattttgaacttacacaataatttacgcttttgtttttcagcaagtagtaagggaggtgggttaatctgaaatgaaatgttcttagatcctgytgttcagttggttggagggcattaaagatagttattacttaagatctctgttgttttgaaattcccattttcctctgacctaaattctatgatgtaaaagaatcccagccaccacagatagactgtttttccttatttaaatgctttaaaatttagttttgacggaatggtctcttaatagaattcttgtgattctgtaa

SEQ ID NO: 457 - DNA, 401 bp, Homo sapiens
taaatcctgggaaaaatgaaaagagtcttccttatgcagttgtgttttgctgctgagttgtgtttgcagtgtattagaagaaatacatgtaggaagcctgttttcagtacaccactgtattactccatggtcttgaatttctgaggtcttaaaatagggttattaatattacggagaaagtcacactgctgggtaatctgrttgaaatggagacagagcataaaccaatagaggtgtacacatatactaagaattttgactggttaagggaaacaagaaacaaatgtatttgttttcattagtaaatatgattttttctcaggatatgagtaagaattagtgaagagggaacaatattaaattattttccttagtaaggtaggatattaaaaattaatccc

SEQ ID NO: 458 - DNA, 401 bp, Homo sapiens
ccatggaaatggcagtaaagacagaacaaagagaatacatttctgaatatactgaggaacatatactccagagagcagaaacaggaagaggggcctctgctaaagctgaaggagtcttcaggagggaacccagctgggctctgtgttctggttggcagatacagagagtagccaaggtcaaaagcagacaaacagaaagtkaggtgattggccacaggtttggaaatggctcaggtttgctctttccaaccccttgcatgtcactgcacatttacctccagaagtaaagcaggagaactctgcaaagggaaccaacamtctgcatgggagggcattgcctccaagtgtgtgggctggcgaccaagtgcagccctctgccctagttatgggagttggagagg

SEQ ID NO: 459 - DNA, 401 bp, Homo sapiens
tcaggagggaacccagctgggctctgtgttctggttggcagatacagagagtagccaaggtcaaaagcagacaaacagaaagtkaggtgattggccacaggtttggaaatggctcaggtttgctctttccaaccccttgcatgtcactgcacatttacctccagaagtaaagcaggagaactctgcaaagggaaccaacamtctgcatgggagggcattgcctccaagtgtgtgggctggcgaccaagtgcagccctctgccctagttatgggagttggagagggacttactggtttgcatgttccatgcaagagctaaagcaaagcacatctcggagaagtgagccaggaaagtggatcaatccatgccaacaacctatattaattaacctgataattaa

SEQ ID NO: 460 - DNA, 401 bp, Homo sapiens
gtacctataaaaccttttagaaaaaaacaggagagtgtctttcagatctaaggtgagccaaataatgggtcgacttgatactgagatcacaacttataaatggaaatgttgataatttggactttgtaaaattaaaaacctttgccctgcaaaagaccctttaaaaggatggaaagacaagctacagattgggagaaaatrtttacaaaccaaatacttgatctaggactagtaactcaaaagtcaacagtaaaaaattttagtaacaatctattttagaaaatgaacaaaagacacaaagagatatttcaccaaagaggatatacatttggtgaaaaagcacatgaaaagatgttcaaggtcattaaccattaagaaaatgcaaattaaaactacaatga

SEQ ID NO: 461 - DNA, 401 bp, Homo sapiens
aaaagcacatgaaaagatgttcaaggtcattaaccattaagaaaatgcaaattaaaactacaatgaggtatcactatccaactatcaaaatggctaaaataaaaagattagtgacgagaccaatcgctggcaaagatgcggagaaactggattactcattcattgctgctgggaatgtaaaatagtacagcccatactagraaagagttcaatttcataaattaaacatacaactaccatatgacccagcaattgcattcctaggcttttctcatagagaagtgaaaacttgtgttcacatagaaacctgtacgctaatgttgaatgttcacagcaactttatttgtaatagctgcaaactggaaacatctccagtgtccactaatgggtgcatggttaaa

SEQ ID NO: 462 - DNA, 401 bp, Homo sapiens
tccactaatgggtgcatggttaaacacattgtgatacatccataccatggaatagtattcagcaataaaatagaacaggcatgcaatggaaagttacatgcaacagcctggatgaatttccagagaaatatgctgagtgagaaaggccaatctcaaaaaattacataatgtatgatctaatttttataccactttgaaacmataaaattaaatgaagaacagattagtggttgccaggggttaagtaaagtgggaggaaagtggttgtggctataaaagtgccacatgaggaatgcttgtaatgatggaattgtctgtttcttgactatgagtgtcaatatcctgaatgtgatattgtgagatgttaccatgggggcaactgggtaaagggcaaatggaat

SEQ ID NO: 463 - DNA, 401 bp, Homo sapiens
ttgaaataacaatttcagaaggatcagcataatgaatctaccagtcactgaaaactctcaattatctgtcttgtcttccctttcagtttttgtttcatttctgttttagtaacctcttagaaaaaggtagtattaaaggagacctaggtctcttttaccaatttaggataacttcacaatctccgcagataaattggtatstgtgtacacacacaaaaataggaaattcttgtgagtagtttacaggggaagtgcttaatatataaacaaggcagtgctctggtaaaattacttattgcattgagattaagaacataataaaattattaaaatagcctaccactttcattacagacttaaaatgttcttccttttatctctgggggttkgataatccctgt

SEQ ID NO: 464 - DNA, 401 bp, Homo sapiens
ataaattggtatstgtgtacacacacaaaaataggaaattcttgtgagtagtttacaggggaagtgcttaatatataaacaaggcagtgctctggtaaaattacttattgcattgagattaagaacataataaaattattaaaatagcctaccactttcattacagacttaaaatgttcttccttttatctctgggggttkgataatccctgtttattgttcttttattttgctgtatatcacgttggccatttaatcattggctctttagcagggtgggtgtagagagcattaaaaaataataaatgatgcagtttatcatcacctccctgtaaaacacaaggcacgtgaaggatatgagtttcctttaagctaacgtatttacttaatgtgatttcaaa

SEQ ID NO: 465 - DNA, 401 bp, Homo sapiens
gtgaaggaaatcagttaaagcattcaaataaagagaaaaatgtaaagagaaacattagtatatttgctatataaatggtaaacgttttatatgtcaaaaatcatttgtatattaaatatttatattaatctgtcatatgtggtagatgattaatatacctagcatataacatgctcatataaataataaaaaaatcataasagaaaacaagacaaaagccrtatatgtagataattcatcaaatggaaaattataaataagcaaattttgaaggaaaataaaataatatgttctatgattaaagtggtcaatgtcttttaaaggctaatattaatagctgacttgtggtctgtaaagaatagtttatttaacatgtgacttataaaaatatataacacttt

SEQ ID NO: 466 - DNA, 401 bp, Homo sapiens
cattcaaataaagagaaaaatgtaaagagaaacattagtatatttgctatataaatggtaaacgttttatatgtcaaaaatcatttgtatattaaatatttatattaatctgtcatatgtggtagatgattaatatacctagcatataacatgctcatataaataataaaaaaatcataasagaaaacaagacaaaagccrtatatgtagataattcatcaaatggaaaattataaataagcaaattttgaaggaaaataaaataatatgttctatgattaaagtggtcaatgtcttttaaaggctaatattaatagctgacttgtggtctgtaaagaatagtttatttaacatgtgacttataaaaatatataacacttttggacagcatttttagagat

SEQ ID NO: 467 - DNA, 401 bp, Homo sapiens
atgcagatcattgttattctataaaatgcagtaccattcagtcattcaaaaatacatttccaaaaaatgtttagagaaaatgctaaaattatgctaagtgaaaattcagacaatatttaaaattttaatagtctgacagattctgatatagataaacagaaagaaagaaaggtaatgtaattttcatgtaattgtacccawgtatatggggaaaaaaggcttgaaggcagtatacaacaaaatgttaaggacttgttatttgcatctactatttcaagaattccttctgaatataaccaacagtttatgcacaaagaatttaattgcaatattcttaataacggtgaaagtcaaatattcatcaataggtaagtgtttaaattacattatcaaatactcrg

SEQ ID NO: 468 - DNA, 401 bp, Homo sapiens
awgtatatggggaaaaaaggcttgaaggcagtatacaacaaaatgttaaggacttgttatttgcatctactatttcaagaattccttctgaatataaccaacagtttatgcacaaagaatttaattgcaatattcttaataacggtgaaagtcaaatattcatcaataggtaagtgtttaaattacattatcaaatactcrgatgatakaattctatgcaggcattataattatgtctttgaagtgtttctgttttaataatatgtaaaagtgcttatgatataatgctaagtaattaaaccatatgaatgtatgttaaaaggctgcatgaaaatatggtaaattgtttgcataggttatcattgagtagtgaaatcataattgctatttctttctttttt

SEQ ID NO: 469 - DNA, 401 bp, Homo sapiens
ggggaaaaaaggcttgaaggcagtatacaacaaaatgttaaggacttgttatttgcatctactatttcaagaattccttctgaatataaccaacagtttatgcacaaagaatttaattgcaatattcttaataacggtgaaagtcaaatattcatcaataggtaagtgtttaaattacattatcaaatactcrgatgatakaattctatgcaggcattataattatgtctttgaagtgtttctgttttaataatatgtaaaagtgcttatgatataatgctaagtaattaaaccatatgaatgtatgttaaaaggctgcatgaaaatatggtaaattgtttgcataggttatcattgagtagtgaaatcataattgctatttctttcttttttcttttttt

SEQ ID NO: 470 - DNA, 401 bp, Homo sapiens
gtaattaaaccatatgaatgtatgttaaaaggctgcatgaaaatatggtaaattgtttgcataggttatcattgagtagtgaaatcataattgctatttctttcttttttctttttttttttttttgagatggagtctcgctctgtcgcccaggctggagtgcagtggtgcgatcttggctcactgcgagctccgcctccygggttcacgccattctcctgcctcagcctcctgagtagctgggactacaggtgcccaccaccacgcccggctaattttttgtatttttagtagagacggagtttcactgtgttagccgggatggtctcgatctcctgacctcgtgatccgcctgcctaagcctgccaaagtgctgggattacaggcgtgagccaccgcac

SEQ ID NO: 471 - DNA, 401 bp, Homo sapiens
tttgttgatggtaaaattctgcctttgcatctgaaattggaaactcttctaatcctggagtctgagtgtaattaatcggaaggctttctcttatctgtgtctaggatcagcctttagtctgatcttcatttttatccaggtgcaaaactcaaatacttttacctttagtgcagtggcccaaattttgtccctagttctgcytgtgctatcattaactgtcattttttaattatatctacacacgaatgtgggccagaggcagcaagatctggattttctcttcctctctgagtccctgacccttggattgttcttccttcttttcaattttggtgggttctgggtttagatttgtagcctaacctagtcaacaacttctttggcatagaaaagaattattt

SEQ ID NO: 472 - DNA, 401 bp, Homo sapiens
agtcaacaacttctttggcatagaaaagaattatttctgatgtgtatattttcccagaagttagaatacccctttgatatatttatttgtgtttaatccacagaaagaatgaagaattaagttatattaacaagagtatcttgcagtatatatatgctttaaagttcacagtgactttgacatgcctctttcatttagttwtcacaactcttggaacgtgtttttgcccattttctgcataagaaaactgaatttcagtaaaattaaattgtttttcccaggcaacccagccaggaatcactagtccccctctctcaaaatccagcatttgctcactagaccagagctgctttaaatgacaatagtgtatggaattcattatagtagaatccattctaaac

SEQ ID NO: 473 - DNA, 401 bp, Homo sapiens
gttgtaacccaaccatgtaaggcacatgttcttaagatctcttgagggatgtgtctcaggctactggtcattcacatttggctcagtctaaatctcttcaaatattaagagtttgactctttgacaactaatacatatatattttaataaccactatgtgccaggaactgtgcttcatatatattattgtgtaattctcaragtaattcccatgacataactatagtacatctgttttaaagatagagaaactgaggctcaaaaagactaagtattttgtaaatattctaagactggaaataatatttgatttcaagattttcttattccaaaatgtgttctgatctgctgctctaccccatctctactaaaaatacaaaaattagctgggtgcagtggtg

SEQ ID NO: 474 - DNA, 401 bp, Homo sapiens
ggtgtgaatcactgtgcccagcttatttattctttctttttttttgtacccattaactatcctacctctctttgtcccaactgcccttttcagcctcttgtaaccatccttctattccctattctcatgagttcaatcattttgatgtttagatcaatatgggacttatatttttaagcattttgatttaattttcatcckttggccaagcttggtgttctgcatttgcaaattttgttagggtacagggtagtcatggctgcaatctggagaaaataatattcaagatagtgttccaggacttattattatcatttcttactggtccattggctgagttggaataccagctaatttattagatataccctatgcttccattgtgcaaacctcagcctata

SEQ ID NO: 475 - DNA, 401 bp, Homo sapiens
aatgaataagaagataataagacgaatggaagactacattctttctactgactggtcatcggtttttctaaatcttggtcctttatctccaatgggtctttgaggacaagcacatcttatgtactttgtaaatatttgctgtttatgcacattttgagtatcattgtttagctttgcttttcagatgcatgaaacaagtamatttgaggcagcaaatgagtaatttgtaaatctagacacaatgagaaggcaattaagaatgctgcttgatgaaaaagaataagagaataatgttgtaggtaagggacaaactaatttcactaatagtggctttatatacagtccagtatgtgaaaatacttaagtaattaacattaacattcacactgtcatcctaggta

SEQ ID NO: 476 - DNA, 401 bp, Homo sapiens
tttctactgaagcccagtaaatggttttgggagacatttgaaatcttagtcatattcaaatcccaaatacaatttctcttttttttcccagaaatttcaaaggttttagaaatattttctactggaaaggtatctctcattcttactcaaaatttagacactaatgagtagatggcaagtcttgtttataagcattaatcrtgaagatgaacatttataactgaaaaaagatgttcgaattttggggtttgtaaaagaactaggaatggagaacatttagagttcactatgtggtgatattcacaaaagcaaatgatgatataactatgtcacttggaaggagcttcaggcaggttctttctcttctacatgtaacatgtaagcctgttttggggtcattg

SEQ ID NO: 477 - DNA, 401 bp, Homo sapiens
ctgtttcccactccatgaaacggaacttattccattcaacttcgtgtaaagtcttttcaaatgacacaactgtaattaggaaagatgtcaataactatttacagatatttatgttgtattcagaactgtactagttagagtgtgtggtttaaaaatttaaaaaaaaagtgggtgagatggtgagacttaactaccctattmcaccactactaggatggtaagaatttagtaagtaaaccagaaagttattagaaaaacaagtaggagcaaaataagctctgtggcattgaactaagaataaaatgtgaagagaaggggtgagctctattatctacttagggatgccttcagtagaaaatgggacttaaaaatgggcaaaacttaggagggtctttccagga

SEQ ID NO: 478 - DNA, 401 bp, Homo sapiens
tacacctggatacaagggaacagtagacactgaggcctactggagggtgggaggaaggtgaggatcaaaaaactacctatcaaatactatgcttatcaactgggtgatgaaataatctgtacaccaaacccccataacatggaatttacctatataacaaacctgcacatgtatccctgaacccaaaataaagtttttttwaaaaaaaataagatcatctagacttgggtaggtggccattgtggacatcatacaagcagaagaagctgatctatggagaagacccataggacagtagtattgagaaagcatagagtcccagagagagacaatccagtttccacagccttgactaatattattgctttataattctgtaaaatttcctctgaagccttcca

SEQ ID NO: 479 - DNA, 401 bp, Homo sapiens
gaaataaaatgaagccacaatctcagtctatgaaaaagagataagttaggataaaactacagcaaaaaatgtacaggaaaagaatgctgctctttaggagagaaatcagaaaagtcagaagataaaatacagagcaaaaagtttactgatcccaacagagaaacaagaaacctcagagcacttatatgcaaagtatttgcrgtgttttggggcccactgactgtaagggaaaccaggtatacacagctttagggcacaatggagagaaagctcttgatatactctcctgagtctcataaacagcaacatcctccaacgtaaatgacagtgaaagaatatgatgaactcctgatgggtrgatgccacaggaggatccagccttatttttcctcagctctttc

SEQ ID NO: 480 - DNA, 401 bp, Homo sapiens
gagaaacaagaaacctcagagcacttatatgcaaagtatttgcrgtgttttggggcccactgactgtaagggaaaccaggtatacacagctttagggcacaatggagagaaagctcttgatatactctcctgagtctcataaacagcaacatcctccaacgtaaatgacagtgaaagaatatgatgaactcctgatgggtrgatgccacaggaggatccagccttatttttcctcagctctttcctcaaggaaaagactgggaattgataatactaaattgacaagtccaaataagccttcaggcaaagcagatgatccttttttttttttttttttaagtatccaaaccagtctcagatttcttcagccagaaagcatgtttttgcaggctttttacaaa

SEQ ID NO: 481 - DNA, 401 bp, Homo sapiens
aggttttgtttgtttgtttttcccaaaagaatttgatgcttgtgttttgaggagttaaaattctcaatgtaatagaagactctataataaacttacgtcttcttagggtgatacgaaaattattaaactcaatccccctttagttgcaaacaatcaatactcaataatttttttgaattgatgaacctctgattgtgtgcractatcttaattatgtctatattcttggtcttgtgatgaaaagtatccagaaaatgtctactattcatcactgtatgccttcttctttttagcacagagctttgtacatacgaagttctcaactaatgtctgttaatttaaattgaagaagctttagggagttactacaatttaggtctggaactcacatcccattttcc

SEQ ID NO: 482 - DNA, 401 bp, Homo sapiens
tatgagttgagtaaccatgatatgctagtatcttttcaaatatataattttttgattatataaagataaggttgatcttcatctcagacaattttccagcctagtagaaacaataaacacagttggattgtaacccaaacttcaactgtaggtcatctcacctaagttagtggatatttggtataatgtttagtaaaaagytacactttgtggcccttcatcatagcaaatattggctttattggcctttaatatcccaaataagaattatcaagaaaataggctccattttcattattaagtatttcagagaaataaaacaataatactgccttaccattgtaggtcattttatagtttccaagggttttcaactatatctttttttaaaaatttgaact

SEQ ID NO: 483 - DNA, 401 bp, Homo sapiens
aaacagacctgtggctaacaaaggattgtgggtggcagttgcttttagaaaccttggtgaaacttttcaaaagaatgtttcctatcaagcggtgcgttgtacatgtgggagaatccctgacagcacgttgctcttcctggagctccgtgagcatttattcccagtaatgtcctttggtgcttctttccttcatcccttaaygaacctaatccactctagccactcttcgtgatgtgaggtcaagagggtgaacayggcagatgtggcatttatgcgattacattctggtggaagaaaatgggccattaaaatgcaaaccaaaaatcaatgatctgattaattgcagattgtgataactgtaagaaagaaacagagtgccctgataaaaattaagtacgctg

SEQ ID NO: 484 - DNA, 401 bp, Homo sapiens
tggtgaaacttttcaaaagaatgtttcctatcaagcggtgcgttgtacatgtgggagaatccctgacagcacgttgctcttcctggagctccgtgagcatttattcccagtaatgtcctttggtgcttctttccttcatcccttaaygaacctaatccactctagccactcttcgtgatgtgaggtcaagagggtgaacayggcagatgtggcatttatgcgattacattctggtggaagaaaatgggccattaaaatgcaaaccaaaaatcaatgatctgattaattgcagattgtgataactgtaagaaagaaacagagtgccctgataaaaattaagtacgctgacttatttccatagggtttctgagaagatcttcactctggggaracaatattta

SEQ ID NO: 485 - DNA, 401 bp, Homo sapiens
agggtgaacayggcagatgtggcatttatgcgattacattctggtggaagaaaatgggccattaaaatgcaaaccaaaaatcaatgatctgattaattgcagattgtgataactgtaagaaagaaacagagtgccctgataaaaattaagtacgctgacttatttccatagggtttctgagaagatcttcactctggggaracaatatttaagctgcgagctaaaggatgacgatgacacataggaaagaatgttccaggctacaagaccaatcagaacagaagccatgaggcgggaagaagctacatgtctctaacttctagtcagtatgaccagagtgtagattgagacagacatgcagcatagaatggaatgagatgaaaatggagacagaggcggga

SEQ ID NO: 486 - DNA, 401 bp, Homo sapiens
cgctgatgtgtttatgattgataactgttttttgtcagctttttaattttagctgcaccatcttactttttggtacagatctatttactatctaggagttgtgggggacttggtgggtagccagaaaagatgacagctagcagagcttaggcacaggagcagatgtaagtgcaggtggctggcagtgtggggaccctggargcagctgctctcagggtaaaatccacgggaggactaggcagggtgagagagcatccccaggcaaagtagagtgacctgcctctgagagtttgggtgtagaatgcagcaggatgactcagaaaagtctgcagagctttagaaawgcttttttttttttttttttttttgatgtggtgtaaggttagaagactagaatgacg

SEQ ID NO: 487 - DNA, 401 bp, Homo sapiens
agcttaggcacaggagcagatgtaagtgcaggtggctggcagtgtggggaccctggargcagctgctctcagggtaaaatccacgggaggactaggcagggtgagagagcatccccaggcaaagtagagtgacctgcctctgagagtttgggtgtagaatgcagcaggatgactcagaaaagtctgcagagctttagaaawgcttttttttttttttttttttttgatgtggtgtaaggttagaagactagaatgacgtttgtctattattcaggagatgttctttgtaggagaaagaaagggaaaaagaaaaagattccaaatattttagtgggcattatgtagttccgtctcttgctccttcccttaattccccctccagaggggaaacagatatctgt

SEQ ID NO: 488 - DNA, 401 bp, Homo sapiens
tttagtgggcattatgtagttccgtctcttgctccttcccttaattccccctccagaggggaaacagatatctgtgaaactgaaaagcttgcatctttgtgagatctgctggagggaagctaccgtttaaacccagtctccattattttaaatggttttaagcctcacatgtagtgctatttatttttccttctaaaaaayatttctgggttatgcctccatatacaaaactcacctttgtgccattgtgctgttttgatgataggtaatttagctagatttagctaccatctattgagcacttaaaattaatctctgtaataaactctattcaggcatttcatcatttaatttaatacaaaccctgtagaaagtggatatcactcctcttttgctaattg

SEQ ID NO: 489 - DNA, 401 bp, Homo sapiens
ggttaaacagaagttacagtctgtgttaccaagggcctcgtagattactggagaagacaaagatgcaaataggcaattataataaaaaatgctacacagacagacaggaatatattcaagtcactcttaggcgcttctcctcccaaaacttaatcccccacttccattacgccatggtgccttccagaattagcgcagttygcatactgaaggaaactgaggggtggtcagaaacccagtttgtgcaggaaaaaaaattgtggagawcaaaattagcttcagtttttaatatcagccattaattctgaggaacaacttcatccacttaacttgattttccatcttccttgagtcccaaggcaaaactgaaatggaaaagaatctacaggatgctttcattt

SEQ ID NO: 490 - DNA, 401 bp, Homo sapiens
aaataggcaattataataaaaaatgctacacagacagacaggaatatattcaagtcactcttaggcgcttctcctcccaaaacttaatcccccacttccattacgccatggtgccttccagaattagcgcagttygcatactgaaggaaactgaggggtggtcagaaacccagtttgtgcaggaaaaaaaattgtggagawcaaaattagcttcagtttttaatatcagccattaattctgaggaacaacttcatccacttaacttgattttccatcttccttgagtcccaaggcaaaactgaaatggaaaagaatctacaggatgctttcatttagcaaagaggcaaacaaacccaaatcgagcagtacatcatagcaacccactaattggaagtctggg

SEQ ID NO: 491 - DNA, 401 bp, Homo sapiens
aatgaacttgttttattgcttatcatatggtccaattttgttaaacattcaatttgccctgggaagtaacatgcattttgcttattttaaaagcagtgcattataaatgcaaattaaggcatttatatataatgacatatatatgtgtgtgtgtgtgtatacatatatatgtatacatatatttgcttttgacttgtttcmtcagctactgggagaggtatgtcaaaatctcaaactttggttgtgaatgtactattctttataaaatttaaaactgtgttattaggtctataaacattaagaatgtttgtatatttttggtgtaatgacccttttatcagtatttttttcatatttatctctagaaatgctttgaagcctaatttgttattaatatatca

SEQ ID NO: 492 - DNA, 401 bp, Homo sapiens
ccacttgtatccctaaagctattgaaataaaaaaaatcacaaagtgctgttgcctactccacagccatgcaagtttgattctggatctgagacaagctatgatcacattgttgtagagaactgaggtccttggaaaataaaacacaggttcccaaccagaagttaattttattctgctgttaaaatggaactatgactttkcttatttataagaactgtccttcctttttaaggttaaaacatgttattttattataatgcaaataatattcattatttaaaaatagaaaaataagaggcagatgtagttctagctcttaataaacctggctaaacttttacaaatttcatctgatcatttatatacttttctacatgattggacttatttataatttgga

SEQ ID NO: 493 - DNA, 401 bp, Homo sapiens
tatcctttcactacctttgataacacactaaatttttctttactatatttcattcccttcttaatctcatttctaaaaactgtatttctgtcttacaatatatatatcattccttcagtactcctacctgttgatcttctcattgttatttactggcttgtcaggtcttggaagataggcttctcatacaacccaagcctstcttttgacctgactataaatattttattgtttacatcttcccctgcaaagaattcctctaggatctgcccctttcttgttctccaggcagtatgccttggacattctgtagctggctgggactgattccttgccaggtcagtaggacagatgtgtagactaagaaattaactagtgagttcaagtggaggttcctggcc

SEQ ID NO: 494 - DNA, 401 bp, Homo sapiens
aaaagaggaactaaaaaaaggctgagaaagcatgccatgaaggtccaggcttggacaacaagcataccatgatgtgaattttagccccatcacctactaactgtgtgaccttgggcaagcttttgaactcaccagggcctcaatttcctaacctataaaatttttgtgatcattattataattacaactaagaataagtaycttatcrttttgctgcaatacacgcgtgataattgtcctaaagtgcttagcatggtgtctagaacgyattatgtacttaataattattgtctgaaaaaataaacacatgaagaaaataccttattgtcaaagaatataatactgtgccccaacttgtgaaagattaaacctcttgtgtctccaggatttctaatagctta

SEQ ID NO: 495 - DNA, 401 bp, Homo sapiens
gaactaaaaaaaggctgagaaagcatgccatgaaggtccaggcttggacaacaagcataccatgatgtgaattttagccccatcacctactaactgtgtgaccttgggcaagcttttgaactcaccagggcctcaatttcctaacctataaaatttttgtgatcattattataattacaactaagaataagtaycttatcrttttgctgcaatacacgcgtgataattgtcctaaagtgcttagcatggtgtctagaacgyattatgtacttaataattattgtctgaaaaaataaacacatgaagaaaataccttattgtcaaagaatataatactgtgccccaacttgtgaaagattaaacctcttgtgtctccaggatttctaatagcttatcccaga

SEQ ID NO: 496 - DNA, 401 bp, Homo sapiens
catgatgtgaattttagccccatcacctactaactgtgtgaccttgggcaagcttttgaactcaccagggcctcaatttcctaacctataaaatttttgtgatcattattataattacaactaagaataagtaycttatcrttttgctgcaatacacgcgtgataattgtcctaaagtgcttagcatggtgtctagaacgyattatgtacttaataattattgtctgaaaaaataaacacatgaagaaaataccttattgtcaaagaatataatactgtgccccaacttgtgaaagattaaacctcttgtgtctccaggatttctaatagcttatcccagaaaggcagtgcagaggacatgtgggctctcttcctactgcagactcrggctrttctgatgg

SEQ ID NO: 497 - DNA, 401 bp, Homo sapiens
tggtgtctagaacgyattatgtacttaataattattgtctgaaaaaataaacacatgaagaaaataccttattgtcaaagaatataatactgtgccccaacttgtgaaagattaaacctcttgtgtctccaggatttctaatagcttatcccagaaaggcagtgcagaggacatgtgggctctcttcctactgcagactcrggctrttctgatggtggggtccaagggcagccttgcttctgccatttgctcagttgatcttgtgaacagctgcggttcttgctgtaactacttgctcgctctcagtgactctgtactgtaaatgtttcatgtgaagragcactgctctaaaacaaagctggaaracagggaggcaattgccagagctgtcattgtgctga

SEQ ID NO: 498 - DNA, 401 bp, Homo sapiens
tctagaacgyattatgtacttaataattattgtctgaaaaaataaacacatgaagaaaataccttattgtcaaagaatataatactgtgccccaacttgtgaaagattaaacctcttgtgtctccaggatttctaatagcttatcccagaaaggcagtgcagaggacatgtgggctctcttcctactgcagactcrggctrttctgatggtggggtccaagggcagccttgcttctgccatttgctcagttgatcttgtgaacagctgcggttcttgctgtaactacttgctcgctctcagtgactctgtactgtaaatgtttcatgtgaagragcactgctctaaaacaaagctggaaracagggaggcaattgccagagctgtcattgtgctgagtcag

SEQ ID NO: 499 - DNA, 401 bp, Homo sapiens
ctaatagcttatcccagaaaggcagtgcagaggacatgtgggctctcttcctactgcagactcrggctrttctgatggtggggtccaagggcagccttgcttctgccatttgctcagttgatcttgtgaacagctgcggttcttgctgtaactacttgctcgctctcagtgactctgtactgtaaatgtttcatgtgaagragcactgctctaaaacaaagctggaaracagggaggcaattgccagagctgtcattgtgctgagtcagggaaggcttcagcaatcatccaaagagatgtggcatttacacctgcagctggatgggttatgaacccaaataggtccttaaaaaggaaggctcatctcctttccccccaacagccccccacccactcaattt

SEQ ID NO: 500 - DNA, 401 bp, Homo sapiens
cagaggacatgtgggctctcttcctactgcagactcrggctrttctgatggtggggtccaagggcagccttgcttctgccatttgctcagttgatcttgtgaacagctgcggttcttgctgtaactacttgctcgctctcagtgactctgtactgtaaatgtttcatgtgaagragcactgctctaaaacaaagctggaaracagggaggcaattgccagagctgtcattgtgctgagtcagggaaggcttcagcaatcatccaaagagatgtggcatttacacctgcagctggatgggttatgaacccaaataggtccttaaaaaggaaggctcatctcctttccccccaacagccccccacccactcaatttttgcctactttaagggaaggtttttgg

SEQ ID NO: 501 - DNA, 401 bp, Homo sapiens
cattgtgctgagtcagggaaggcttcagcaatcatccaaagagatgtggcatttacacctgcagctggatgggttatgaacccaaataggtccttaaaaaggaaggctcatctcctttccccccaacagccccccacccactcaatttttgcctactttaagggaaggtttttggtaactaatttttcatctgctcattaragcttaccaattacagcatgtgttacaaattataggttccaggactttgggtgaaatrtgcttcgtaaataatggcatattttgctgtgagcagtccttgattttggactcttgcattacctttcatctcgcaaattttccgtataggaatacttggatgtacaaatttcaggcaagtatccgatgtatcttatagaatc

SEQ ID NO: 502 - DNA, 401 bp, Homo sapiens
ctgcagctggatgggttatgaacccaaataggtccttaaaaaggaaggctcatctcctttccccccaacagccccccacccactcaatttttgcctactttaagggaaggtttttggtaactaatttttcatctgctcattaragcttaccaattacagcatgtgttacaaattataggttccaggactttgggtgaaatrtgcttcgtaaataatggcatattttgctgtgagcagtccttgattttggactcttgcattacctttcatctcgcaaattttccgtataggaatacttggatgtacaaatttcaggcaagtatccgatgtatcttatagaatcagctacccgacaatattgtcaaaaagagaagcaacgctttcagatgatgtaagcatag

SEQ ID NO: 503 - DNA, 401 bp, Homo sapiens
tcacttttcacatgaaagtgtatgctcagataaaacaagactcatggagagcacatgggtgagatcatgctaggctctcattgctaggctgagatttgcatttttctgaaaatcagagtgctgaattttcttagctttgaagtagctaatgggacagtgtgtgtatatgtgtgtgtgcccacttgcatataattccgaatyacttgtttatgtgtagtatatgattctatgacaaagagctccctttaatgcaaatrtaaggcattcatgagcatctcatgtataagctcatattttgaactttgtttttcttttactcaaagaatttacaaaatcattttgtggtttgaaaagtaattcagatttcctataaaatgttatataaaattttaaatttagat

SEQ ID NO: 504 - DNA, 401 bp, Homo sapiens
gggtgagatcatgctaggctctcattgctaggctgagatttgcatttttctgaaaatcagagtgctgaattttcttagctttgaagtagctaatgggacagtgtgtgtatatgtgtgtgtgcccacttgcatataattccgaatyacttgtttatgtgtagtatatgattctatgacaaagagctccctttaatgcaaatrtaaggcattcatgagcatctcatgtataagctcatattttgaactttgtttttcttttactcaaagaatttacaaaatcattttgtggtttgaaaagtaattcagatttcctataaaatgttatataaaattttaaatttagattttagctagcaagtattggcttaactgtagaaagaacttcattttctaggaccatt

SEQ ID NO: 505 - DNA, 401 bp, Homo sapiens
aagctagaaagtctaggaactaagattcagaacaaaatcatctgattccactctctgtgctcttaaatacttcactagaataagtcttattttttataattgatacaactggtctaaatattaatgaagttttaagattcaatttacatatagcttctgtctctgtaagttaccagttattactacctaaaatacacttgkagtcaatagtaacattgaatattcctagattttattttwtaataccaaccagaataggaggcctcaaaayacctgtgatggaaaaaatgcagtgcctgagtgcatgcagctaagcctgatcactagaatacatttcatttatattttataagataccaaagacttcagaactacaaagagaactatagttgctgcaacca

SEQ ID NO: 506 - DNA, 401 bp, Homo sapiens
atctgattccactctctgtgctcttaaatacttcactagaataagtcttattttttataattgatacaactggtctaaatattaatgaagttttaagattcaatttacatatagcttctgtctctgtaagttaccagttattactacctaaaatacacttgkagtcaatagtaacattgaatattcctagattttattttwtaataccaaccagaataggaggcctcaaaayacctgtgatggaaaaaatgcagtgcctgagtgcatgcagctaagcctgatcactagaatacatttcatttatattttataagataccaaagacttcagaactacaaagagaactatagttgctgcaaccagaaacctattcacatatacgtacttttataaatcatgtg

SEQ ID NO: 507 - DNA, 401 bp, Homo sapiens
ttcactagaataagtcttattttttataattgatacaactggtctaaatattaatgaagttttaagattcaatttacatatagcttctgtctctgtaagttaccagttattactacctaaaatacacttgkagtcaatagtaacattgaatattcctagattttattttwtaataccaaccagaataggaggcctcaaaayacctgtgatggaaaaaatgcagtgcctgagtgcatgcagctaagcctgatcactagaatacatttcatttatattttataagataccaaagacttcagaactacaaagagaactatagttgctgcaaccagaaacctattcacatatacgtacttttataaatcatgtgcatatgtgtgtgggtacctycatgtgtgtgc

SEQ ID NO: 508 - DNA, 401 bp, Homo sapiens
aggcctcaaaayacctgtgatggaaaaaatgcagtgcctgagtgcatgcagctaagcctgatcactagaatacatttcatttatattttataagataccaaagacttcagaactacaaagagaactatagttgctgcaaccagaaacctattcacatatacgtacttttataaatcatgtgcatatgtgtgtgggtacctycatgtgtgtgcatatataaatacatctaaaagctgagaaccaccttagtctggggcattaaaattttagtaaacttttttgatgtatatgttgaataagttgcaaagttgaagtctgttccctgcctccatgtggcttacgtacacttgctaatgagaaaggagcttattacaaatattcatagatgtgatatatatgtg

SEQ ID NO: 509 - DNA, 401 bp, Homo sapiens
atattcatagatgtgatatatatgtgtacatgtgtgtatatatatgtgtgtgtatatatacatatatatgtgtgtgtatatatacatatatatatctttctccccctacacacacatacacacacccctttattcgctctcttttttttttttttttttttttttttagttggagtctcactcttgttacccaggctagartgcaatggtgcaatcttggctcactgcaacctctacctcccgggttcaagcgattcccctgcctcagcctcccaagtagctgggattactttctactatacaaattttactgtcatagacattggcttttgtacctccaaaatgtttgttattatccacggaaagggtacccacattttacttctatggataaattacac

SEQ ID NO: 510 - DNA, 401 bp, Homo sapiens
agcacttaaaatgctgcctggcacatgtagagactcagaatatgctttcagaattgaatgaaaatatcttgacaaggtagcacagtttttgcttttgtttttgttttaatagagtcagggtattgctctgtcaccccacccaggctggagtgcagtggtatgatacagctgactgcagcctcgaactcctgggctcaagcratcctcctgcctcggcctcctgagtagccagtaccacaggtgtgtgccaccacgcccagctaagtttttattttttgtattttttttgtttttttgagatagggtcttcctcagtcttcaggtacaatctcagctcactgcaacctcaacctcctgggctcaagtaatcctcctgcctcagcctcccaagtagctaggac

SEQ ID NO: 511 - DNA, 401 bp, Homo sapiens
tctcaaactcctgtgttcaagtggtcctcccgcctcagcctcccaaagtactaggattacaggtgtgagctaccacacccagcctaatattttattttttgtagacacagggtccccttatgttgcccaggctggtctcaaactcctgtgttcaagtggtcctcccgcctcagcctcccaaaaggttgggattacaggtgygacccactgtgtcagcctctcattgttttccatctgacaggtgagaaactgaacctcagagagcatggattactgacccagtatcacagctagtgcagtgcagaagcaggagtggaacctccatttggctccactggccagactccctatctgtgactctgtctccaagaagctcttcgaggccagacagcagcatcttc

SEQ ID NO: 512 - DNA, 401 bp, Homo sapiens
ctggggtcttttaggtcacaagtatccctggtcttttcatgactacacatttctggctgactttagagctctagatgtttttctcctatgttgatctaccccgtaaggctccatgagaggcttggactattgtttcacagtaggcttcctaagacattttgcttagctccttgaaggcttccacctgctcttgagcttagraggagaatatggcctagtcaaagagagaagagcataatagcagataggagtaagtgagcaggaaacacagagaaatggtgaagaggaggaaagaatggccaatagaagatggaaaggcagcagtcacggtcacaaaaaaagggtccagaaacaatacaggagatgcacaagagatttcattgcttttaagaagtgttatg

SEQ ID NO: 513 - DNA, 401 bp, Homo sapiens
ttacatatgtaagataaatttaagatttgtgtttaaatgacttttaaaagtaaaaaaagcattgggaagacttcttactcagaggttgtggtcagtcattttcaaataatttttcattgccaacatctcatacataaacttatataagcttctacaacccctcccagagtcagccttctctcttctttcagtaacatcctrtgttgccatctgactgaactgcaccatttgtcaccagttccaacacatcttgtcaacataccttttctattggaagaaaaaaagaaaatgggcttgaataaaaacatgtaaataaatgatgagcactttgctcttttggttgaattaaacagtgttgaaaggtgttagctagagaagacttaatagaaagtataacattt

SEQ ID NO: 514 - DNA, 401 bp, Homo sapiens
caccagttccaacacatcttgtcaacataccttttctattggaagaaaaaaagaaaatgggcttgaataaaaacatgtaaataaatgatgagcactttgctcttttggttgaattaaacagtgttgaaaggtgttagctagagaagacttaatagaaagtataacattttaaataatgtttaaggggaaaaagaaaaagayattttaggtttcagaataaataaaagataaaaataaataataaaagattttaagtattagggatgacttgcaaaatctcagaggtaaaggtaagaaacactagacagaaaataattttatttgaatttaaaaaatgggagagaatccacagaccctttgagggaactggatcatctttgcagactccctgagatgtcgaa

SEQ ID NO: 515 - DNA, 401 bp, Homo sapiens
agcaaaaacaatccctacaattcatctctcagaaagccccattcctaggagaagggggagaacaccacatcaagggggcacctcatgggacaaaagaatctgaacagcagttcttgaatcccagatcttccctctgacatagtctacctgaatgagatgggaccagaaaaacaattctggtagtatgacaaaataaggttrtttaacaccccccaaaaatcataccagctcaccagcaatggatccaaaccaagatgaaatctgaattgccagaaaaaagaaaaattggaaggttggttattaagctcatcaaggaggcaccagaaaaaggtgaagtccaacttaaagaagttgaaaacgtgatacaggatatgaaaggaaaaatcttcagtgaaataaag

SEQ ID NO: 516 - DNA, 401 bp, Homo sapiens
gagaaatgcaaaatgcactggaaagtctcagccatagaatcaaacaggcagaagaaagaacttctgagctcgaagacaaggcatttgaattaactcagtccatcaaagacaaagagaaaagaattttaaaaaaatgaacaaaggctccaagaagtttgggactatgttaaatgtcccaacctaagaataactagtgttccygaggaagaagagaaatctaaaagtttggaaagcatatttgagggaataattgaggaagatatccccggccttgctaaagatctagacattcaaatacaagaagctcaaagaacacctgggaaactcatcgcaaaaagatcattggcttggcacacagtcatcaggttatctaaagtcaagatgaaggaaagaatcttaag

SEQ ID NO: 517 - DNA, 401 bp, Homo sapiens
gcatatttgagggaataattgaggaagatatccccggccttgctaaagatctagacattcaaatacaagaagctcaaagaacacctgggaaactcatcgcaaaaagatcattggcttggcacacagtcatcaggttatctaaagtcaagatgaaggaaagaatcttaagagctctgaggcaaaagcgtcaggtaacctatraagaaatatctatcaggttaacagatttctaagcagaaaccctacaagttagaagagattggggtcctattcttagcctctttaaacaaaacaattattagccaagaattttgtattcagcaaaactaagcttcgtaaatgaaggaaagatacagtgtctaccaggcacacaaatgatgagagaattcaccattaccaag

SEQ ID NO: 518 - DNA, 401 bp, Homo sapiens
ctaacactggagcacccaaatttataaaataatcactactagacctaagaaatgagatagacagcaacacaatagtagtgggggacttcagtactcccctgacagcactaaactggtcatcaagacagaaagtcaacaaactctagcctgcaacaaatgaacttaaaagatatttatagaacattctacccaacaactgcmgagtatacattctactcatcagcacatggaacattgtccaagatagaccatatgataggccacaaaacaagtctgagcaaatttaagaacattgaaattacatcaagtactctctcagactacagtggaataaaattgcaaatcaactcctaaaggcatccccaaaccatacaaatacatgcaaattaaataacttgctc

SEQ ID NO: 519 - DNA, 401 bp, Homo sapiens
caataaatgtgatacaccacttaaacagaattacaaccagaaatcacatgattgtctcaatagacacagaaaaaccatttgacaaaatccaatctccctttgtgactaaaaacctcagcaaaatctgcatagaagggtcataccttaaggtaataaaaaccatctatggcaagcccacagccaactttatactgaagaggraaaagtggaaagcattcccactaagaactggaacaaggatgcccactttcaccacttctattcaacatcgtaccaggaatcttagccagagcaatcagacaagacaaagaaattaagagcatccaaaatggtaaagaagacatcaaattgttgctgtttgcagatgatatgatggtatacctagaaaccctaaagtttcc

SEQ ID NO: 520 - DNA, 401 bp, Homo sapiens
cagatgatatgatggtatacctagaaaccctaaagtttccaccaaaaagctcctagaactggtaaatgaattcagcaaagtttcaggatacaaaattaatgtaaaaaattagtagctctgctatacactaacagcaaccaagctgagaatcaaatcaagaactcaacccctttcacaatatcagcaaaaaaataaaatacrtaggaatatacctaaacaaggatgtgaaagacctctacaaggaaaactacaaaacactgctgaaagaaatcatagacaacacaaacaaatggaaacacatcccatgctcatggatgggtgaattaatattgtgaaaatgaccatactgccaaaagcaatctacatattcaatgcaattcccttcaaaataccatcatcac

SEQ ID NO: 521 - DNA, 401 bp, Homo sapiens
gtgaattaatattgtgaaaatgaccatactgccaaaagcaatctacatattcaatgcaattcccttcaaaataccatcatcactcttcacataactagacaaaacaatcctaaaattcatatggaacaaaaaaagagcctgcatagacaaagcaagactaagccaaagaacaaatctgaaggcatcacattatctaacatsaaactatattataaggcaatagtcaccaaaacagcatggtactggtataaaaataggtgcatagaccaatggaacagaatagagaacccagaaataaacccaaatacttacagcccactgatattcaccaaagcaaacaaaaacaaagtggggaaaggacaccctattcaacaaatggtgctgagatcattggcaagcca

SEQ ID NO: 522 - DNA, 401 bp, Homo sapiens
aatgaaactggatcttcatctcttatcctatgcaaaaatcaactcaagatggatcatatacttaaatctaagatgtgaaaccataaagattttagaagataacatcagaaaaacccttctagacattgacttaggcaaagacttaaatgaccaagaacccaaaagtaaatgcaacaaaaacaaagagaaatagatgggaaytaatgaaactaaaaagtttctgcacagcaaaaaaaataatcagcagagttaacagacaatccacagagtaggagaaaatcttcacaatctatacatctgacaaaggactaatatccagaatctacaaagaattgaagcaaattagcaagataaagacaaacaatctcatcaaaaagtgggctaaagacatgaatagacaa

SEQ ID NO: 523 - DNA, 401 bp, Homo sapiens
tttctcacagtttgatttcaatcctctcacattttgtgaggtggctgtttataccaatctgtggcctaagatattcttatgactattacttgtttatcaaaatggtacacattcttcagttgcagctccacaggctttctggaactactgtaattaacattgatttctttatctctttccttatttgtcatgtatgattakcactacatagaatgacatttactttttctcctttttcttttatatgtgctaattctgtctctttagcctagtcagaagctctgagttcgcagaataaccatgaacacagaattaaaggtctagatagatcttgtctaaccctttcattttcaaagaaggaaagtttgtaaaatggaaactacagtgatattgagtgtata

SEQ ID NO: 524 - DNA, 401 bp, Homo sapiens
agagcaagtaataatgttatactgagtgattaatgaactgatgtaaggactcagtaatccgcatgcaattagtggatcaacaaagcaatttacgcagtaggtatgtattttgaatagtattctttctgtagggaaccagctgtatgtagtgtttaattgaatgcttttgcatcacagagtgatttggagtcaaatcatcarccgcatttcccaatgtgtcaagtagacagttaacttatcaaaacttccgtagtactcagttctcttccaatgtgctccttatcttgaattcttttgaaatagtgtgccttataattttccaggaatgatttacatgtattcctgttcagagacagagggatggattacataacattccctgaggccctttttgccttcga

SEQ ID NO: 525 - DNA, 401 bp, Homo sapiens
cattcattttcccctggtgaataagctggccctttcccaacctgactctcatcttgttatttgatcccaagatctgtaactcctctcagaccatctgcattatttctctgtccttgctgatgttttgcaacattctccagctgactatcatctgcagatttcattagcacaccatttactatgttctgaagatcattaatraagatgaataaacagaagagaagaccttctgcagacatctgtggaatttctctgggctgcccccacaactcgatcgccattgttttattttacctttttggttttttgcctagtgtttcattcacttccctccataagcaccctgttgtcatatctgagtaactgcactcataatgtgtgattttcttgcacagctttat

SEQ ID NO: 526 - DNA, 401 bp, Homo sapiens
atgaagatttatatctaacttatattgaaaaatcaaaggattagattttttaaactgaataagaaccatagctgtacttagagaatatctgtgatgcacttggcactgtgataagatgtgatgtatatcactatgattacaccaaccctgaatggcacttattttcaggtgtgacactagcctatggcggctgtcatgagrattagaaaatggtgtcccctccaggaggatactgcctgtgcctgagaatagagcacaggctgcatctaaggacccactgaccttctaggccagatatctttgtgtgtggcagagcctgcctaaatgtacatggaagccacgatttctttgtcatttaaatgaagaggataagatacctataaaagatagatttgagattg

SEQ ID NO: 527 - DNA, 401 bp, Homo sapiens
ctacttgggatgctgaggcaggagaatcacttgagcccaagaggcaaagttgcagtgagccaagatcatgccactgcgctccagcttgggctacagagtgagactccatctcaaaaaaaaaaaaaaaaaaaaaaaaaaaaaactactacttatcaaggaatgttttgaatgctttaattctttgacttaaattactatatwtatttataaaggtgtagaagatttracaactggaatgtgtgtgtgcgcatgcacatatacacacatatgcacatatgtatatatgtgtatgtataacatatatatctataaataaaagttatttaccaaagcatcatatattttcattttcttttctttccttttgttagcattttcatttttcttgagtactgttttta

SEQ ID NO: 528 - DNA, 401 bp, Homo sapiens
atcacttgagcccaagaggcaaagttgcagtgagccaagatcatgccactgcgctccagcttgggctacagagtgagactccatctcaaaaaaaaaaaaaaaaaaaaaaaaaaaaaactactacttatcaaggaatgttttgaatgctttaattctttgacttaaattactatatwtatttataaaggtgtagaagatttracaactggaatgtgtgtgtgcgcatgcacatatacacacatatgcacatatgtatatatgtgtatgtataacatatatatctataaataaaagttatttaccaaagcatcatatattttcattttcttttctttccttttgttagcattttcatttttcttgagtactgtttttattgaaatgcaccttgcactttagct

SEQ ID NO: 529 - DNA, 401 bp, Homo sapiens
agctggaacagttcaataagagtctccctctagcctctccttacttctgaataagcaaagttaagctacagtcaactagtcggcttctctaatattctgtattgttctgaggtttaaggctttgtttttttcttggctgtctaggctctctgattaactgagattaatctctatcatcctgtgtaagctaaaccctaaatyacataatatgttttctatctgtatgccatatgccttccatgtcagggatgactccagagacaacaaaagcaagctgtgtttttactgattttgcaaacttgcattcatcagccttgggcattttggcctccccagtgtcagtatggtgttttaatagctgagaaaaacaacagaaatataaagagaggacactgtgaaaa

SEQ ID NO: 530 - DNA, 401 bp, Homo sapiens
aacaacagaaatataaagagaggacactgtgaaaatcactttccaaactgacttgtattgaaactgcctcacatctaagtaatggaaaataacagtgattaggataatgcggtgcattacattcggtgacagttaatcctcttattaacttcatggtcatatttcgctcatttgttaggttggaaggactgtgtgagaatrttgtagttcctgtttttctgttcattgggaaagttgggaaaatagttctaaaaataaaagagttccaggttgaaaagcctttgaggttgactgttctctctggagatgcatgtttaccttgtgccctttatccatgctttgagtttgggtacccactctttgaggcctcattctcttccctttagaggattttctttcca

SEQ ID NO: 531 - DNA, 401 bp, Homo sapiens
taaaaataaaagagttccaggttgaaaagcctttgaggttgactgttctctctggagatgcatgtttaccttgtgccctttatccatgctttgagtttgggtacccactctttgaggcctcattctcttccctttagaggattttctttccacctgagcaatcaccagtgagggaaaagtcagtggggtggttcagctgcrtgatatgttgcattgacaaatggaggcagagccctgctccagccccgtgagttggaacaacctacaaagcatttctggcagtgagccaaagaggtgatccctcctctagggaaaaaaaaagtcaatggctgagattgcagttctccatccccttgctgggctgattcatacagcagcattgacactgaggtctcagaaga

SEQ ID NO: 532 - DNA, 401 bp, Homo sapiens
ccctcctctagggaaaaaaaaagtcaatggctgagattgcagttctccatccccttgctgggctgattcatacagcagcattgacactgaggtctcagaagaactgttctcttcccagtccatctaaaaatatctaaattcagatttataatgtcaggagctgataaatttgctgaggaaatgcaagcagtgtcactgccrtgctaggaaatctattctgatgaattgatgagggaaagaaattccaaacatagcagagtctcagagtgccacttcccctgggatggtgagcaaaatgagcatgttttccttgccatcgaagttcccttcttcaaacatagtagaaagtagaatatactagattgaaaaggaatatggaaaatacctttttgatcaaaagc

SEQ ID NO: 533 - DNA, 401 bp, Homo sapiens
cgtcaagcaaggggttcccttttaaaatgctctttcactaagacaaaaattccactcacatagccctggtgacttttgattgaatcaggatcttttaaatttggaactcagcaagaaaccgactgtcttactttcctacaggttttgtttgaactttcagaatctaagttgatattgcggtctgctgctaaccagctcttycctctctttagttggtcagtggattctcaggagtattataggatgtttcctccataccacctggcttgaaatgatttggcataggcttcaactctaatttattcagcatccctttagcgcctactagaaaccaagtatcatgactggaacttttctgaaatgatgaaggtgccatggggacagatgggcgtgtaaagaac

SEQ ID NO: 534 - DNA, 401 bp, Homo sapiens
taagaaatagatctactgaaactaataaaagaattccattgttgtctcctccatttaaaaaaattctacctgaaatacttgttagaatttttataaaagtagtatctcatttatgtacaaaatagtttgtgtaaactataagtagacaaagatgtagggttgtatcacttctttgataagatactgatcttgtatttttamccaatgctaggcttaataaaagggtcctgtaaaatttactatgaaatctgtatgcctccctccaacttcttttccaactgagattggagtatggcaaaggaaatgaagcatgaagggaaaactaggagctatgataatctaagattcataaacaattataacattatttgctcacttttgattgtgcaaatgactaaatc

SEQ ID NO: 535 - DNA, 401 bp, Homo sapiens
gcccacatggccacaggatcagagcaggtcatggtgaagcagaggagaaacagctgcaaagcagagaagaaagtccaatagggtaggatgtgatgaataatgttgtgaaacagacagctagtgccagtaaggctcctatatcatagaagtctaggaagatacaagcaagtgctgtcatagacagataaatgaagtggacaytgttttgagacaaaagcaagctggcaatatcagagaagcttactataaagagcaaaatgctgggtgcactggctcatgcctgtaattccagcagtttgggaggccaaggcaggaagattacttgagctcaggagttctagaccagcctggtgagacctttatctctacaaaaataaaattaaaaactacctgggcatgat

SEQ ID NO: 536 - DNA, 401 bp, Homo sapiens
acacatttgaataaagcagcatgacagtgggacaaaaagtacacaagacaaaagctccatcgttagggccaaagcataggaacaaactcaggccagtgatggagcaacttcagctgagattttagccaagagcttgttaacatctttccagttcccagatagaattagtcctaaggaattacgaacattgtattccatggyatatatatatatactacattttctttatcctctaatcaactggtgatggacactgaggttggtttcatatacaagagcagatgtcttttatttttttttttttgagacagagtctcactctgtcacccaggctgaagtgcagtggtgtgatctcagctcacggcaatgtctgcctcctaggttcaagcgattctcctgcc

SEQ ID NO: 537 - DNA, 401 bp, Homo sapiens
atttttagttccttgagatatcttcatactgttttctatacgggttgaaccaatccatattcccaacagtgtataaatgttctcttttctccacatcaacatctgttgttttttgactttttaataatagctattctgactggtataagaggtatctcatgtggctttaaattgcatttccatgaaaaagaatgaaatcaygtcctttgcagcaacatggatggagctgggaaccattatcctatgtgaaataattaagaagcagaaaatcaaatatctcatgtattcatttataagtgggagctaaacaatgagcacatatgcacataaagatggaaataatagatactggagacaacaaaaatggggagrgagagaaagctgaggattgaaagatgatc

SEQ ID NO: 538 - DNA, 401 bp, Homo sapiens
ttgcatttccatgaaaaagaatgaaatcaygtcctttgcagcaacatggatggagctgggaaccattatcctatgtgaaataattaagaagcagaaaatcaaatatctcatgtattcatttataagtgggagctaaacaatgagcacatatgcacataaagatggaaataatagatactggagacaacaaaaatggggagrgagagaaagctgaggattgaaagatgatctattggataaaatcttaattatttgagtgtatacggagagcccaatcttcaccattacacaatacacccatgtaacaaacatgcacatgtactccctgaaactaaaaaaaaaagaaacaagcattgtgaactgctggatccccaagaaaggcagatgaccataactaggaa

SEQ ID NO: 539 - DNA, 401 bp, Homo sapiens
aagcaagacaatttgttaaggcttagcatgcaatcaggcatccaaaattccatgaaaaccagaaggcagggtgaggaaggaacaggaaccaggcagcagttctgtgcagtggcaccaagtgacagcaagaaggcagcagtactaccaaggcaagattacacccagccaaaaaaccaccagtctgcagggcagccaattgayactccaggcagagccattcagagctgaagagaaagcactaaaaaaaagtgcagccacttctgtgattaaagacaatgcccatggtactaaagtaccgtcttggagacactggtcatagttgttaaagcttccagccctcccagagaacatctctatgaaaaaaatactggtacagcagccccaggcccaccttctggagg

SEQ ID NO: 540 - DNA, 401 bp, Homo sapiens
ccagaagccccaaaagagcagagaccctgactgatttgttccatggatacctccagcatctagaacaggacatgacatatagtaccccttcaaccagtagttgcctgacttttctgccctcatttaatggatcctgtctctgaacctgcaggcatcatcatatactatcgtaagtgatttccttagcttcctaaacccagraagaatccacattctatttctcatggtttttttctatctgtatagcagcatcaaagtgggccctggtttttagtttgagggatatgccacttctgcaaccagctggcataaatgtggcaattgacacgataagagaagctgttctcccagccagggaagaggcattaccaattacaggcctatactataactgtgccttt

SEQ ID NO: 541 - DNA, 401 bp, Homo sapiens
tcgcacgcatacacacatgctcagacaatgagggtggctatctggcagcttccacctttcccactagagttttcaaatatttgccacactatgccagtgccaaaatttatataataatctatccttcagaggcttctccccttgagctgctcacaatttacccctccttctaactcacaaggagttacaaggccctggaawtgtgcctccctcgacagccacaagtgaaatagtcaccaggttcatggtcttactcgaatccctgtcatgcagggatttcttcatttgcttggaatgactcatcaaacagcctagctttacagttccttgacctcggctcttcccaggacttttatctccatatgtcgacaggaatctactttcttggcacttgttactaa

SEQ ID NO: 542 - DNA, 401 bp, Homo sapiens
ttaaattttctgtagagatagtatttacctatgttgcccaagctgatctcagactcctggcctcaagtgatcctcctcccacctggtatgaagcactgtgcctggccttgaatttcttaatgatgtttttgtgaatctatttgtcaagagtacaactgccagatttttgtgcatttgtgcccctctgctccgaagtacccygactgtcagtctattcattcagtcatcaaataactttggggcatctattctatgccaggcactactatggtaggccttcaataaagggaggctatgtttacatgggccttccacttcacaggcaagaaccgcactactgaatctcccgtgtctttgtccctccagataatttagtgtgcaccttatgaccttcactgaca

SEQ ID NO: 543 - DNA, 401 bp, Homo sapiens
tactaaatcagaaataccaaattcataagtcatttggaagggtaacaaatgtttgatggtttgtcaactagtcttgacaaacggattctacaatgtacagaaattatggagacagttttcactgatagatgttcagtgcctcaaaggaaactcattaagatgagggaatgccctctcaaatgtaacaggattgttgaatayatcaacacaaaagatcactagcaaatggattcctaatgaattcctggttgaatttgcctctgataattatgtattcatattcagtttgagcattcagatgtgttaaatatggccaataatagcactgatttatttcctcctttaatttagaatatctttaagtagttagaaggaaacccttgttaactaatccattgaca

SEQ ID NO: 544 - DNA, 401 bp, Homo sapiens
acttttctttccaaagggaaaaatttttacttatgaaaaatgtggtaaaatatagaataggaaattctgaaagatacaagttcttcttgaacaatgagcaatgtaaaaatgataaaattattgcatgatacaatcttttttaaaaaagagaaaacactgagcatcttttccttaagccccctttcataaaatctcatattwtgcccacttctccatcttaatgattgtggatttctttctcaagacctacttaatacatctcagttggaatttcgaaatgctggcaagtctttaaaaatagacagatgatgaccctaagacatttggaacttatcctaaaggctgaggcacagtagagaaaatatattgaataatatacaattttggtcaggaaatgagga

SEQ ID NO: 545 - DNA, 401 bp, Homo sapiens
aaaagaagtatttcttaccttcttctctaagactgcacattccttgggggtttacccatttgagactgcaagaagatgaaataactcacttttctctattaaaaggtgatctcaattgctatagagagaagaaataaacaattattaatattcctgtgtcagagagtgtttataaaagcaaactgtgaggttcgtaatctktttttagacaagaaaaagatttaaagaatgacttaaagtgatgattataagaaaataaggagaaaaaggagagagaggagaggttaataggtaggggaaattgattctagaccaagcacttaagaattctagttctatgtttgatttcctttttatacatcttgcactttgctctaaagcaaaggagttacaaaattttt

SEQ ID NO: 546 - DNA, 401 bp, Homo sapiens
agttctgcttcccaagttcatgtaccattccagcaaattccggaattcttttcatactattcattctacaataacttgacccctctttttgttgacgatgactttctgttgcttacaataaaaagaccccagtagctgggcacagtggctcatgcctgtaatcccagcactttaggaggctgaggtgggcaggtcgcctgrtgtcgggagtttcagaccagcctatccaacatggtaaaaccctgtctctactaaaaatacaaaaattagctggacatggtggtgtgcgcctgtagtcccagactcaggaggctgaggcaggagaatcagttgaacccaggaggcagaggttgcagtgaagccgagattactgttgattactgttacactccaacctgggt

SEQ ID NO: 547 - DNA, 401 bp, Homo sapiens
ctaaaaatacaaaaattagctggacatggtggtgtgcgcctgtagtcccagactcaggaggctgaggcaggagaatcagttgaacccaggaggcagaggttgcagtgaagccgagattactgttgattactgttacactccaacctgggtgagagagagactctgtctcaaaaaaaaaaaaaaaaaaaaaaaaaaaaagamcaaaacaaaaaaaagcctaaattatacaacaggatccatgggagaacatcttgatagctttttagcaggaacatcacattccaaatgcttgctagctattttctgagtatcagttatatttaccatgatcctgaggagcagaccctttattgtgtcccagttcagtttgcatcgtcttcatacagcataaggcaacagtg

SEQ ID NO: 548 - DNA, 401 bp, Homo sapiens
agagtggtttgtggttggaatttctcttgcttgttgatatatgtactttccatgttggactttgtgcttatgtgaattctccacgtctcaaaggcattatgtctagcaagcaatttctcataaattcttatccatacagttattctatgagagcattgcaaatatagtcagattaggctttgatttgtttttcattctaaygctatctaacaaggggatgttctgatttgtgtagccctgtgcctccaagaagttaacggtaccagatacacagctcatttattttcattgtgcccatgtggttttctgaagtcacactttgtgttgttttacatatgggaaaatggaaacctggctaacttgtctttagtaagtgattggtggagaaattagtagaaact

SEQ ID NO: 549 - DNA, 401 bp, Homo sapiens
agctaaaattgaatgagttagttacaaagtctgtggggttgactcgagtagagggtggttgatcagtgtaggtttaatgaaattaaaatgagtaagattctataaatgcaagactggccagagaaagtggggagctctggggccagaacagcagaggaccaaaggcatcctacacagccaattaaggaattttcctactgmagcatggggtccagggagcttcatttgtaatcccttgttctgctttgtttcattcttggactctaatatggtttgactgtgtcctcacttgaatctcaccttgagttataacaatccccacgtgtcaaggttggtgccaggtggagatgattgaatcatgggggcagtttcccccatactgttctcctggtaagtaaata

SEQ ID NO: 550 - DNA, 401 bp, Homo sapiens
aatattactaccattattgcaattgcgtagtagtacatgccaaattcaccctgtcttttcattttacttacctttctcttgtcccacatgcttttattcttggcatgcttacctacaaaattatcctttttttctatttccgtattccctatgccctgtagtcttctttcaaagcccctttgaaatgctatcatgaaagayggatttcttttctcagtgctgtgagcacctccatctcctcttctcttctttcacggtgcccatttcttcttcatctcatcaagtatgcagtcctttcttcgtctgcactgttatgtacctccttccacctttgtttcttccaaacttgtatttcttttgtctttccatttaacaggcctcatttcttttatcttaggaat

SEQ ID NO: 551 - DNA, 401 bp, Homo sapiens
cactccaattaaacaaaagtctatgtccagttgaagtctggaagcctgataagcacactgaagtaaaagtcgcaatacacatgaatgactgaaagtaggttttgttaccagtggaaaagacatttgtgagaacaaaatgacacataaagaggaagcaagtgattactgacttactggaaatcccaggccgggcacggaggytcattcctgtaatcccaacactttgggaggctgagatgaggggcttacctgagctcaggagtctaagaccagcctgagtaacaagtgagaccctcttctctaccaaaaaataatttaaaaaaaattagccaggtatggtagcccatgcccatgcctgtggcctcagctactcaggaggctgaagcaagaaaattgcttga

SEQ ID NO: 552 - DNA, 401 bp, Homo sapiens
accccatgccccatctctactaagggggggtgggattcactgtcaaaagagttcttctctttaaattctatacaataggtacagtaattatatctaattgcatttgaaacacaatagttattaaggcaaacgtttctagactagtttcattattaaataaaaattgaaactgagagtttttcccatattggtaaatattgwtttaattttttaattgaatgggaataatatgggcatttttttatcatttgcccaaaatattttaagaaaatactatatagtgtaaccttttttttttttttttactatgaaggcattaattttgttttatttttagtacttgcttccagttcacttttcaaagtgtcctttaggcttgttagtttcaaaggaaataatat

SEQ ID NO: 553 - DNA, 401 bp, Homo sapiens
tagaatttaaataacttgctcaggaaggcatagccaataaatggaataagtaagtctcaaatctggacagtctatcttgagaaatgcatgcttaatcaccatcctctattgcctcttaaataatcaaagcccgtaaagattttataaatgacttttctcatgaataatagggcctggggtgagtttctcaatatcacttayggcaataagaatttcagcaatcataatcttggtgcattttccaaaaaggatggctccccattgggtaacacaaggtgaaatgtgtattctgttagaaatttttgattccagcctagggaggtatcaagaataatgctgttgccataaagatataagtcttgagacaaacactggagaggttcagtcattcaatcaactat

SEQ ID NO: 554 - DNA, 401 bp, Homo sapiens
ttttgcttcccctttcagaggaaactacatttgatcattaaaccaatacatcatttatattcattttttcaaaatatattaggttggtgcaacagtgattgaagttttgtcattgaaagtaatggcaaaaaccacacttttgcacctacctaatataaaacttcatttttgttttgtctttcatattgatgaaccatcatytgtttatttttttggatattggattgccttcattgttttcactattataaatacccctattacacatacaaaatcaaaataccatttttgccttggctttttaagaaaataaacgttgattttaaaaacaatttcagatatacagaaaaattgtgaagatactacagtgaattctcatttccctctaccatgttccccct

SEQ ID NO: 555 - DNA, 401 bp, Homo sapiens
ataattattaaattctattgtatgcttgtagctgaacaaaatttttaacccatattgctgtaggaaagacactttatcaactagagagtttgagtttatgtgcagttcctcttccttttagacttacagactccactcatttccaaaattactgttaaccacttttaccttcagtgaggttgtagtgtacatttgtgatayagttatattcttttggaacagcctgcattccatcctgtgataaatatgtattgcaaactctaaagaaacctttttaaaatgactaaaaagaagattaaagatgcagtgatgcgggaaatcagtaaggatataaaatcagtaatttgacctgaacagcactatcaatcaatttgttctaattgacatgtatagactattcc

SEQ ID NO: 556 - DNA, 401 bp, Homo sapiens
ttctcaccacgatgtcagtacggaagtttgaaagaaaaatgtatgcgtctcccgtagagcccatgaacttgttttcttttgcatattatagaatctgcaggtatttttcaaatgaggaccacaaacattcaagtattaggttttcttacaatgacagccaatttagcaagcccaaggttttagagcatccttcaagaggcwggttccatttgcacgttcatgttcaattcgcaaagcaacagcagcagcctttacgtatcccacgattaacacttcaacctccagcccattttgtaaggttaggcattcatcaaaatgtcagaatgattacagtacagatctaaaatcccttttgtcagacactggactttaatccgctcttttctgtagtcacgtcctgt

SEQ ID NO: 557 - DNA, 401 bp, Homo sapiens
taaatttctgttgtttaggccacccagtctgtagtgcttgtaatgtcagccccagcaaacaaatacagcctctcaactatgtctcatcggtaaattaattatttctccccaactcataccataaaatattttagacagcttgcacaagcccccaaacaaaaaaactgtgatgaaatggctaaatagtgtagtagccatggygtatacgaatataaacagaaacatcgtaacaggaaaaaataagaaagtccattagatgcagttgagcttccagcttgtctcttagtttcctggaaaccaaagtgaaaggaggtacctgtttggtcagaaaagttttagtattacaaaggaaatagcattgtatttctttaggggaagcaaaaactttttcttagccctaa

SEQ ID NO: 558 - DNA, 401 bp, Homo sapiens
tcttataaacataagaaagctacataagcatcacaaaaaattacaaacagctatgcctcattttcataagtgatgtcctgactctatctgatctagttttcatgtaagtcctttgccactttacatctatcctcaaaagcctaacggaatctggctggataccccaggtgcttcctcaacgtagaagttttctcttgtttktttttttttttattctgagttattttgaatatatcagtcaattttaatctaaacttgcattatgttttcaaatacaatataagaatttaattaaaaacaatgcttcactgacagcagctctacaattctgtatttgacattgtagtacaacatgcaaaggcatgtattgaggtcagtctgaaatgaaacacttagcctct

SEQ ID NO: 559 - DNA, 401 bp, Homo sapiens
ctcctgatgagctctgagccttctcagtgctatgagtatttacatcaggcagaggtgggttgggatccaaagcttacccaccctaatatgagtaagatgattctattacattcatcctagagagaatatccttcatagaaatagaggaagaaaaagcttgcatttggttaggaatatagattatgaagagcctccttatcytgaaagctgagataatatctgtatcatatgtggtaacaaaaaataaggttatttgtataaagaagttagcatataggaaggtatatagtaaagtgcttcataatggcaggaaggaaagaaatattgaaggaaaaatttaaaagacattgcgtcagttggtatctgtttttggcaagtaaacaaacaaaatatattttctc

SEQ ID NO: 560 - DNA, 401 bp, Homo sapiens
atatgccacataaccataattcatcctggcaattaggtaaacagtatacagaatatgactctcgccattaaataaacttaagcaaggtatctttatcctgaaggaattcttagagatttcatcatgagtaagcacttttcagtatagaattgccaaaatacaaaagaacaccagagaaccactctaacttctaaaaaaaawaagaaacccaaaaccttgtgattgaaaaaaaaaaaaaaagtaagaaaaagaggcccttagtcattctgttcccttttgggcctctatctttcatttcctctggggaaataaagttataaactgtgctggcagtaatctagggtgatgccaagtcagttacccacccccaactccatgtctccaaaagattctttaccacc

SEQ ID NO: 561 - DNA, 401 bp, Homo sapiens
aagaaaaagaggcccttagtcattctgttcccttttgggcctctatctttcatttcctctggggaaataaagttataaactgtgctggcagtaatctagggtgatgccaagtcagttacccacccccaactccatgtctccaaaagattctttaccaccctttgactctaattaaagaaaacaaatgtttccagttttctrtcatgtacctttccactctgaattatagaatagctttcttgaaattcttttaattgttttttacaaaggattagcattaaattcatagataaaaataaattagtaatagtgatcaaaatgacctaactccactttgtttttacttttcttctgggtaggagggcaaataacataactgcttatatggtgatttattttaa

SEQ ID NO: 562 - DNA, 401 bp, Homo sapiens
gataaaaataaattagtaatagtgatcaaaatgacctaactccactttgtttttacttttcttctgggtaggagggcaaataacataactgcttatatggtgatttattttaaattgaatctgaatttctatttcttaaggcctcattggcttcatggcaaataagagagttttaaagaatttattgtgttaatttctgaraaaccaggagtttactgttgacaataatggcacaaattacaactcctacacagctctaccccctccacttttgagtttcaagacttttgccaaagttttctggtctttgttcacttctattattaacatctcttgtgtgaaggggaattttgaatgaatgggatgaaatcatctaaaccagcttcggtcctaaatatagt

SEQ ID NO: 563 - DNA, 401 bp, Homo sapiens
tttgccaaagttttctggtctttgttcacttctattattaacatctcttgtgtgaaggggaattttgaatgaatgggatgaaatcatctaaaccagcttcggtcctaaatatagtgtctggcatcaggtctgggaaaaaaaaaattggtcaaagagatagcctgaggttatttttaggaagttggatgtttagggaaattratactatgaaagttctggcctctatctctgaagatattccattgagagatacatgcatgcattcaacatctcgtttttttccattcctgcccttygggtgttccgcgtcattcactatcttgtcattacagcattaagcagaagcttgaggcagaagatagctaatgcaacgtttccatttggtcctgtaatttttctgc

SEQ ID NO: 564 - DNA, 401 bp, Homo sapiens
gcttcggtcctaaatatagtgtctggcatcaggtctgggaaaaaaaaaattggtcaaagagatagcctgaggttatttttaggaagttggatgtttagggaaattratactatgaaagttctggcctctatctctgaagatattccattgagagatacatgcatgcattcaacatctcgtttttttccattcctgcccttygggtgttccgcgtcattcactatcttgtcattacagcattaagcagaagcttgaggcagaagatagctaatgcaacgtttccatttggtcctgtaatttttctgcacagagctttataggatttcatttcgggttaataaggggaagttggaaccgaggagaaagcttatgctctgccaacatatactgaggattactaa

SEQ ID NO: 565 - DNA, 401 bp, Homo sapiens
ataaatgtcacatgttcgttgaatgatccagatgtttcaaatatacagttgttttatatttggtaaacaatgcagttaggtcatgtaaattttaatttttcatttggagtttatccctatgcaggcaatcatagattagaaagttatttttttcatgtcctacctctttgaattgtcaggttcttttaaatgctgttatgyagcaataaataatattttatccataatcaaggtggatgacttactggatatcagatattattattaacaaaaagtttactacattgtacaartatcactagacaaagacaacctctagaaagttaattaaggtaactaaggttctcaactgcaaccacaaaactttcacagttaataataatttcacagttattaacata

SEQ ID NO: 566 - DNA, 401 bp, Homo sapiens
taatttttcatttggagtttatccctatgcaggcaatcatagattagaaagttatttttttcatgtcctacctctttgaattgtcaggttcttttaaatgctgttatgyagcaataaataatattttatccataatcaaggtggatgacttactggatatcagatattattattaacaaaaagtttactacattgtacaartatcactagacaaagacaacctctagaaagttaattaaggtaactaaggttctcaactgcaaccacaaaactttcacagttaataataatttcacagttattaacataactttttsaagaggtactatactaaaccaaggatgctaaatataacttattaatttctgtgatggcttctggggatatcaatattggtatac

SEQ ID NO: 567 - DNA, 401 bp, Homo sapiens
aataatattttatccataatcaaggtggatgacttactggatatcagatattattattaacaaaaagtttactacattgtacaartatcactagacaaagacaacctctagaaagttaattaaggtaactaaggttctcaactgcaaccacaaaactttcacagttaataataatttcacagttattaacataactttttsaagaggtactatactaaaccaaggatgctaaatataacttattaatttctgtgatggcttctggggatatcaatattggtatactttcctcactgcaatgaagacacttctgcatctacttttgagatttttttggtcatctttctagcagccagctgtcacctcttgctgctgtaacagttcctagtaatagttccctt

SEQ ID NO: 568 - DNA, 401 bp, Homo sapiens
gtaaatatatgtttgaaaaagaattaatgagctcttaattgcagatcaaaggatatggtttgatagtgaagtggcccaatgaaagttgtttgaattttccttttgtctttctgtaaatggaactgtgttcttgaaagcctctacgtctttatcttgttcctcaagattcttagggcagtgcgtgtgggtcaggggtaggtrtgtctgggaattaagagtatctagttgatttagtagctatatttctcttctttagcctgtttattgggaaatgaaagacaatttaggctatttcattttcagtcagtgtctgttatgaattcattggaaayagcaatgtgaaaagaggaatgaatattgtagatttctttcattgtcatatttgtaaattactgggtggg

SEQ ID NO: 569 - DNA, 401 bp, Homo sapiens
tgaaagcctctacgtctttatcttgttcctcaagattcttagggcagtgcgtgtgggtcaggggtaggtrtgtctgggaattaagagtatctagttgatttagtagctatatttctcttctttagcctgtttattgggaaatgaaagacaatttaggctatttcattttcagtcagtgtctgttatgaattcattggaaayagcaatgtgaaaagaggaatgaatattgtagatttctttcattgtcatatttgtaaattactgggtgggatttataaacaaattattgactaattatgaacaaactgttgtttttttcttttcaatcaatatgaacaatcaagtgacctaacamatttaattttaaaaatagatttgaaaggtatatagtagttaaaaca

SEQ ID NO: 570 - DNA, 401 bp, Homo sapiens
aggctatttcattttcagtcagtgtctgttatgaattcattggaaayagcaatgtgaaaagaggaatgaatattgtagatttctttcattgtcatatttgtaaattactgggtgggatttataaacaaattattgactaattatgaacaaactgttgtttttttcttttcaatcaatatgaacaatcaagtgacctaacamatttaattttaaaaatagatttgaaaggtatatagtagttaaaacaaggccccttgattcagattgcctgagttcatatctcaaataggctacttttttgtggtgtgcctttaggcaggatgcctcagtttcctcatatgtaaaaaagaaatgttaatagcagcttaccttgtggggttgttgtgagtgggtcaaatgac

SEQ ID NO: 571 - DNA, 401 bp, Homo sapiens
taaatcatgccagtcaggaaaaggggtacattggttattctatttataacattacttgagtatttataacaacaagtaaacaaaacgttttttagaaaaagaagagattactgtgttgtacaaatattactagatgggtaatttctctcctttttttccaatgtattccagaacccccatggatatcaaaattaaatgctsaaatcccttacataaaatggcatagtatctgtatactttaagcagattacttataatacctaatataatgtgaatgctatgtaaatagttgccatactgcatttttaaaattaatattattttttaatattttaacctttttttttttttttttttttttttttttttttttttttgagasggagtctygctctgtcacc

SEQ ID NO: 572 - DNA, 401 bp, Homo sapiens
gatatcaaaattaaatgctsaaatcccttacataaaatggcatagtatctgtatactttaagcagattacttataatacctaatataatgtgaatgctatgtaaatagttgccatactgcatttttaaaattaatattattttttaatattttaacctttttttttttttttttttttttttttttttttttttttgagasggagtctygctctgtcacccaggctggagtgcattggtgcaatctcagctcactgcaacctccacctcccaggttcaagcaattctacctgcctcagcccccaagtagctgggattgcaggcacaggccaccacacccacctaatttttgtgttcatagtagagacggggtttcgccgtcttggccaggctggtctcaaa

SEQ ID NO: 573 - DNA, 401 bp, Homo sapiens
aattaaatgctsaaatcccttacataaaatggcatagtatctgtatactttaagcagattacttataatacctaatataatgtgaatgctatgtaaatagttgccatactgcatttttaaaattaatattattttttaatattttaacctttttttttttttttttttttttttttttttttttttttgagasggagtctygctctgtcacccaggctggagtgcattggtgcaatctcagctcactgcaacctccacctcccaggttcaagcaattctacctgcctcagcccccaagtagctgggattgcaggcacaggccaccacacccacctaatttttgtgttcatagtagagacggggtttcgccgtcttggccaggctggtctcaaactcttgac

SEQ ID NO: 574 - DNA, 401 bp, Homo sapiens
tatttttccaatatttttgatctatgattggttgaatttgtggaagccaaacccacagacatggagagccagctgtgtattgttattgtcatgtcttttattctcccctgttcttttctgcctaaatgccttaggtacttctttacagagttagatagcatttaccattgataccacccagagtggtgtggtttgcttctyctgaccctttcatgagcaaagctggtttcaggggaaactcagggatctgaacwgttagtaacactgattagaaatgcagcagttttattcaggccttggttttattgaccatttttggttggctcttatctctgtgactgatcatgtatgcgtatttcaaatggataaataaactaaaaagtgtttaatactccaaaatg

SEQ ID NO: 575 - DNA, 401 bp, Homo sapiens
cacagacatggagagccagctgtgtattgttattgtcatgtcttttattctcccctgttcttttctgcctaaatgccttaggtacttctttacagagttagatagcatttaccattgataccacccagagtggtgtggtttgcttctyctgaccctttcatgagcaaagctggtttcaggggaaactcagggatctgaacwgttagtaacactgattagaaatgcagcagttttattcaggccttggttttattgaccatttttggttggctcttatctctgtgactgatcatgtatgcgtatttcaaatggataaataaactaaaaagtgtttaatactccaaaatgattagaagtgtattgttaaataccaaaaagaaaataattctggggtgtttcag

SEQ ID NO: 576 - DNA, 401 bp, Homo sapiens
tagaaatgcagcagttttattcaggccttggttttattgaccatttttggttggctcttatctctgtgactgatcatgtatgcgtatttcaaatggataaataaactaaaaagtgtttaatactccaaaatgattagaagtgtattgttaaataccaaaaagaaaataattctggggtgtttcagcatgttattctgttarcrtagttcacgttgagtgtttgtattcatttgttgtttgtttgtttgtaagtaacaggttttgactaaaattccacggactgtggaacarcacacactggggtctatcggagggtggaaagtgggtggagggagtgggtcaggaaaaataactaatgtatactaggcttaatacctgggtgataagatagtctttacaac

SEQ ID NO: 577 - DNA, 401 bp, Homo sapiens
gaaatgcagcagttttattcaggccttggttttattgaccatttttggttggctcttatctctgtgactgatcatgtatgcgtatttcaaatggataaataaactaaaaagtgtttaatactccaaaatgattagaagtgtattgttaaataccaaaaagaaaataattctggggtgtttcagcatgttattctgttarcrtagttcacgttgagtgtttgtattcatttgttgtttgtttgtttgtaagtaacaggttttgactaaaattccacggactgtggaacarcacacactggggtctatcggagggtggaaagtgggtggagggagtgggtcaggaaaaataactaatgtatactaggcttaatacctgggtgataagatagtctttacaacaa

SEQ ID NO: 578 - DNA, 401 bp, Homo sapiens
aaatggataaataaactaaaaagtgtttaatactccaaaatgattagaagtgtattgttaaataccaaaaagaaaataattctggggtgtttcagcatgttattctgttarcrtagttcacgttgagtgtttgtattcatttgttgtttgtttgtttgtaagtaacaggttttgactaaaattccacggactgtggaacarcacacactggggtctatcggagggtggaaagtgggtggagggagtgggtcaggaaaaataactaatgtatactaggcttaatacctgggtgataagatagtctttacaacaaacccccatgacacaagtttacctatataacaaacctgccattgtacacctgaacttaagtaaaaaaaaaaaaaattaagtcatgtaga

SEQ ID NO: 579 - DNA, 401 bp, Homo sapiens
aactagtaagattaatctacaacccaggcttctgactctatttcaacattcttctcataatgtcattgaggttacacttaataaacaacgttaaacactctctcttttaaaaaaaattgttggctatacatgttggctcacgcctgtaatcccagcactttgggaggctgaggcaggtggatcaccagagttcaggagttygagaccagcctggccaacatggtgaaaccccgtctctactaaaactacaaaaattagctgggcatggttgcaagtgcctataatcccagctacttgggatactgaggcaggagaatcgctggaacccgggaggcagaggttgcagtgagctgaaatcgcacattgcmctccagcctgggcgacaagagcaaaacttcatc

SEQ ID NO: 580 - DNA, 401 bp, Homo sapiens
ctgaggcaggtggatcaccagagttcaggagttygagaccagcctggccaacatggtgaaaccccgtctctactaaaactacaaaaattagctgggcatggttgcaagtgcctataatcccagctacttgggatactgaggcaggagaatcgctggaacccgggaggcagaggttgcagtgagctgaaatcgcacattgcmctccagcctgggcgacaagagcaaaacttcatcccctcccccccaaaaaattgttaactactacaagcataaatatgaatatctacttacctgcatttctgaagctagaccataagtattaacagtgcttatatctacagtccctggcagatagtcggtgtaagaaatatagattaattgaatgaatcatatgatcatgg

SEQ ID NO: 581 - DNA, 401 bp, Homo sapiens
gcctgggcgacaagagcaaaacttcatcccctcccccccaaaaaattgttaactactacaagcataaatatgaatatctacttacctgcatttctgaagctagaccataagtattaacagtgcttatatctacagtccctggcagatagtcggtgtaagaaatatagattaattgaatgaatcatatgatcatggttaagkttcttcttttgtgcgttttagcatttttaaatttttacattgatcatgtattgcttttgaaattttaaaaaacctggcaaaatrtaattacgatagaaactgacatcaaaaagctttgtagctgaaatagtgtaattttacactgagtttgaaacttctgatatcaggaactttgatgagcctaatacaggtgctatacg

SEQ ID NO: 582 - DNA, 401 bp, Homo sapiens
cctgcatttctgaagctagaccataagtattaacagtgcttatatctacagtccctggcagatagtcggtgtaagaaatatagattaattgaatgaatcatatgatcatggttaagkttcttcttttgtgcgttttagcatttttaaatttttacattgatcatgtattgcttttgaaattttaaaaaacctggcaaaatrtaattacgatagaaactgacatcaaaaagctttgtagctgaaatagtgtaattttacactgagtttgaaacttctgatatcaggaactttgatgagcctaatacaggtgctatacgggatgaagtgaatatgcttagaatttttgatgaaaacaaatctgactaytcaggtttctctatgagaagggtaggcagtttgat

SEQ ID NO: 583 - DNA, 401 bp, Homo sapiens
tattgcttttgaaattttaaaaaacctggcaaaatrtaattacgatagaaactgacatcaaaaagctttgtagctgaaatagtgtaattttacactgagtttgaaacttctgatatcaggaactttgatgagcctaatacaggtgctatacgggatgaagtgaatatgcttagaatttttgatgaaaacaaatctgactaytcaggtttctctatgagaagggtaggcagtttgatttgtaattatgggaagctgaatgtgaggcttggatgaggctttgtcagtatcagaccagctccttcctattgggggctgaattcccttgggctctccatcagagagaccaacaggaagcaatcatgtagttcttccaacacactcagaagtcagtaggtccactc

SEQ ID NO: 584 - DNA, 401 bp, Homo sapiens
cataggttccctcccagtggtaatgagtgagttcttactctgttagttcatgcaagaattgatggtttaaaagagtctggtgattctctcccctctctcctgcctgtgctctcaccatgtgacatgtctattcctccttcaccttccagcatgattgcaagcttcctgagttcctgaccagaagcagatgctggcaccacrctttgtgtatagcctttagaaccatgagccaaatcaaccacttttctttatgaattattcagtcccaggtattcctttatagcaacacaaaacaggcaaataccggagcaacagatcagaataaataacgctgagaggacctgacctgatttgctrtaggtattgttctagggtagcccctggtatccattgaagactct

SEQ ID NO: 585 - DNA, 401 bp, Homo sapiens
gcaagcttcctgagttcctgaccagaagcagatgctggcaccacrctttgtgtatagcctttagaaccatgagccaaatcaaccacttttctttatgaattattcagtcccaggtattcctttatagcaacacaaaacaggcaaataccggagcaacagatcagaataaataacgctgagaggacctgacctgatttgctrtaggtattgttctagggtagcccctggtatccattgaagactctgaccgtgagctctgcctgcattaatataactggaccaaaggaaacagaactttagttttatgaatgggtgtctctccaaacaatttttcctggctgagctttgttcattaacatttttcaatttctaaagaacaaataatctccatttctcttttt

SEQ ID NO: 586 - DNA, 401 bp, Homo sapiens
attaatgactcattctctctgttgagtgagggcttattccagctggctcgcgctattctgtgtgtatggattctgtcagcagggttgaaataagatgttaactggcagttattcattaatttacagcaagaacaatgacttgactctatgtcaaccatttctgaaacattttgactaacatttttcctgttgcttagaackgaacttaaaagctgggacaggcatatggaaagaagcaaggatccccagttatgctgattggaactaggactaatggttttaacacagaatgtttatgcatgtagaatgaaatacacacacacacacacacacacacacacacacatacacgcacatacaaggggtcatactttatgtttgcattttcctctaaaagtatc

SEQ ID NO: 587 - DNA, 401 bp, Homo sapiens
ttttttcatcatagtttgtttaaaagataaagcagatattataattattttctttacaggtgggaatgagttaaacaataattaactgaacaaaagcaatgtccaggtactgcaaaactttacataaattactcctattcattttcacagcaaccctctgaagtaaatggtattatcccaacttacagatgtggaaactartactaattaacttacctagaatcgaggtggcagagccaagacacgaattcaagtttctcttcctcaaatttaacattctttcttgtacaaatgtaaatgttctttaaaaatgaatacataatggcaggattcatatcaattttctgccagaattaccatgtttacctgaagtaaaatatgctcataaacaaagcagaaag

SEQ ID NO: 588 - DNA, 401 bp, Homo sapiens
cataaacaaagcagaaagtgcagctggtgcttacatctaggatgattaactggcatgtacagaatttttttttccttcaattgcaaagtgaatgcagtaaaattacagggcaatgggtttcttcccacacaagacaaggtgatctgaatgatatagaagagaaatgccacatgtggaaataatatatcaaggatttattaygtgtctgtggtcattcttaaggtcatttttgatgtctacacatttcagcatttgagaagttgtatattacatgcatacaaacccatattcaaatatacaattggctaaacaagtatttgttttaataaagtagtartaataaaatatttatagcaaaggrgacaagactcaggactgagaggaaaaactcaattaaaaaa

SEQ ID NO: 589 - DNA, 401 bp, Homo sapiens
aggtgatctgaatgatatagaagagaaatgccacatgtggaaataatatatcaaggatttattaygtgtctgtggtcattcttaaggtcatttttgatgtctacacatttcagcatttgagaagttgtatattacatgcatacaaacccatattcaaatatacaattggctaaacaagtatttgttttaataaagtagtartaataaaatatttatagcaaaggrgacaagactcaggactgagaggaaaaactcaattaaaaaaaagacaacaatacttaaatctcttgatgcatctacttagcaatgtctacaatagcttttttaacactatcagaatatagagcataaattataatgtttatcctgcttttaaaggaaaatttttctcttatgcaatc

SEQ ID NO: 590 - DNA, 401 bp, Homo sapiens
gaaatgccacatgtggaaataatatatcaaggatttattaygtgtctgtggtcattcttaaggtcatttttgatgtctacacatttcagcatttgagaagttgtatattacatgcatacaaacccatattcaaatatacaattggctaaacaagtatttgttttaataaagtagtartaataaaatatttatagcaaaggrgacaagactcaggactgagaggaaaaactcaattaaaaaaaagacaacaatacttaaatctcttgatgcatctacttagcaatgtctacaatagcttttttaacactatcagaatatagagcataaattataatgtttatcctgcttttaaaggaaaatttttctcttatgcaatcatggtgggagaaaagaattcttaa

SEQ ID NO: 591 - DNA, 401 bp, Homo sapiens
taacactatcagaatatagagcataaattataatgtttatcctgcttttaaaggaaaatttttctcttatgcaatcatggtgggagaaaagaattcttaacgtgattatttgtctcatattttattttaggattctgttagtgtttttaggattctatcaatgcaaggtgtaagaacatgtcctggcagttgaaggaaagrctaaggaaaaagatgaaagagaagtgtcgcatcccttaccctccttttaaagaaatgctgaagttgctgagcagaargtgccacagtcatgtcccttaatttatccctcaaccttttccagaagtaaagtgactacacctaagctcagacagtgacagtcgtgggagaaaagctttatagraacagtgataggaataaaa

SEQ ID NO: 592 - DNA, 401 bp, Homo sapiens
tggtgggagaaaagaattcttaacgtgattatttgtctcatattttattttaggattctgttagtgtttttaggattctatcaatgcaaggtgtaagaacatgtcctggcagttgaaggaaagrctaaggaaaaagatgaaagagaagtgtcgcatcccttaccctccttttaaagaaatgctgaagttgctgagcagaargtgccacagtcatgtcccttaatttatccctcaaccttttccagaagtaaagtgactacacctaagctcagacagtgacagtcgtgggagaaaagctttatagraacagtgataggaataaaagtgtgtgcactgggatagatgtattttttaattacagaagtaactactaatctatataagagaggctccttccactc

SEQ ID NO: 593 - DNA, 401 bp, Homo sapiens
cctggcagttgaaggaaagrctaaggaaaaagatgaaagagaagtgtcgcatcccttaccctccttttaaagaaatgctgaagttgctgagcagaargtgccacagtcatgtcccttaatttatccctcaaccttttccagaagtaaagtgactacacctaagctcagacagtgacagtcgtgggagaaaagctttatagraacagtgataggaataaaagtgtgtgcactgggatagatgtattttttaattacagaagtaactactaatctatataagagaggctccttccactctcagagcttccaacttaaccatctgtgaagagtaggtccttcaaaaccaactgtagcggcaaagttctgagrtgatatttccagactcagcagataggaacagg

SEQ ID NO: 594 - DNA, 401 bp, Homo sapiens
acagtgacagtcgtgggagaaaagctttatagraacagtgataggaataaaagtgtgtgcactgggatagatgtattttttaattacagaagtaactactaatctatataagagaggctccttccactctcagagcttccaacttaaccatctgtgaagagtaggtccttcaaaaccaactgtagcggcaaagttctgagrtgatatttccagactcagcagataggaacaggcatgctaggtgagatatggcagggaatattagtcagggttctccagagggacagaaccaatttgtgtgtgtgcgtgtgtgtgtgtgtgtgtgtgtgtgtgtgtgtgtgtgtgtgtgtgacagagacagacagaaagagagtgctttagtttaaggaattggctcacaa

SEQ ID NO: 595 - DNA, 401 bp, Homo sapiens
gagaggtcagtcttttgttctattcagatcttcaaccgattgaatcagccccactcaccttatggaggacaatttgcttgactcgaagttcattgatttaaatgtaaatcttgtctgaaaacaccctcctagaaatattcagaataacgtttgacaaaatatccagggaccagggaccatggcccagccaagttgacacaytgaactgaccattacaagtctagttggcacccatatacatctccttaagccattcttaatctccaaatgtggtcacattctgaggaactggtggttasagcttcaacatatgcattttgaggagatacagtgtagtccacatcatggaggtagccctagaatttttttgtttccattcctattggcagagacaattgagg

SEQ ID NO: 596 - DNA, 401 bp, Homo sapiens
taaatgtaaatcttgtctgaaaacaccctcctagaaatattcagaataacgtttgacaaaatatccagggaccagggaccatggcccagccaagttgacacaytgaactgaccattacaagtctagttggcacccatatacatctccttaagccattcttaatctccaaatgtggtcacattctgaggaactggtggttasagcttcaacatatgcattttgaggagatacagtgtagtccacatcatggaggtagccctagaatttttttgtttccattcctattggcagagacaattgaggaaaagggaaagttccctttcatttattttactctcctgcacatctaatctttaaggagagaatagaatgagagttggggcacaaaacaaggattgaag

SEQ ID NO: 597 - DNA, 401 bp, Homo sapiens
tcatggaggtagccctagaatttttttgtttccattcctattggcagagacaattgaggaaaagggaaagttccctttcatttattttactctcctgcacatctaatctttaaggagagaatagaatgagagttggggcacaaaacaaggattgaagggcagctgacttgagtccacgtagccccagaacaaagcaaaggracattagattagtggggtagtagagattaaagaagtaaacagaattgaaactggcagaagatagggtcattgtagagtggaaaaacatatctgaaacatggttgttaagtcataagctaatatttggaaagacagactccacttacttttttccaatagatatatatttactaaaatcttgggaaagctaagcttatgat

SEQ ID NO: 598 - DNA, 401 bp, Homo sapiens
aatttttattttaggttccagggtacatatgcagatttgttatataggtaaactaatgtcataggggtttgtaatacaggttacttcatcacccagggattaagcctgttacccaataggtattttttctgatcctctccctcctcctaccctccaccctccaccctcaagtaggccccagtgtctctttttcacctctaygtgtccatgagttttcatcctttagctcccgcttattagtgagaacatgtagtatttggttttctgttcatgtgtcagtttgctaaggatgttggcctccattcttgccatgaaaaacaacaggaaaataaagcactacccttgagcatgcctctagaacttgaggttcaagaacaacagaagagtggcagaaaactata

SEQ ID NO: 599 - DNA, 401 bp, Homo sapiens
taccaggtgatggttaggaaacagaaaattcctgaagcatctcttctttttaatgaagtatcaaaaatactgttttattaaaatcgggagaaaaaaggctttaggccaagtgtgttgggttggccttgcaactctacttcggttacaaatttaaaggccaaagagttagagattgtgtatatgggtatgtgtgttgcaggktggggtgtgggacatatcaatacaataggtaaaatgaatggtggattgtgtctgggataatgtggcatattttatctcaaatcccaaccttatctcccaataggagatttggatcatgagcaagatttggcttaggctagttttcaattcccaggattccagctccttcatagcaccacccttatgcttactaatccctt

SEQ ID NO: 600 - DNA, 401 bp, Homo sapiens
gatgactgacaaaatttttgaaagtaatagagagaaactgaggcataaaatttacctgaaagcagtcctgtttaaattggacaaaataattaccttttcttacatccctcttttagagttttcctaatatcatttaatacatagatagtactagaaagaaaaagacattttaaattaagaccaatgtgaagcattataccmatttagtatcattttgcccattacccttatagaaactaaaaatagaatgagtgctcagagtttgtactgtaactgcctgccacttacatgggataactatttttagttccatcgtccttattaaaggctttcattatgagttcatttatggaaatgttatctcacagagttttttttggagacttttctgagatctcaaa

SEQ ID NO: 601 - DNA, 401 bp, Homo sapiens
gaaacatgattagaacatagtcatttagtttcccagcaaatgctgatcctttccaggaaagttctataaataaggaaccaaagctggttgtcagtaatttgaagtagctgggttggaccgtgaatattaatatgtaaattatagcttgtgccatctatacacaaccaggattgtatgcatatcttcccatggtttattttmagtctgaatttgcatacaaacactggtctaattgagtttttaaaaaaaattcttaagagatgccatgtgttacttaaagatgttttgttttgaaactttgtgataggtaagatccactaatgtttgtaaaatttaccatttgtaggaaatattctattctcagtaattcctggtgaaagtggtaggtgggttagagatca

SEQ ID NO: 602 - DNA, 401 bp, Homo sapiens
cttaatgctgagtatattgggactcttgtaaatggacattttgttcatggatattttgttttagcaatttaaagaatgttaactagcttaatattttagagtgaacattttaaagtgataaagaaaaataagaaactttcttatctcaattaaaaatatatatgtatttttggtccacacaaatcacatcacccaaataaktcagagcactttgctagaaaaggcaagacaaggtgtttctgagagtgtctccgcatttagatagactatttagttccatacttagagatcatccactagggtttctttgagcttggtgaagaatattcagcaacttgcctaagctctgggaatgtgagcatcagttatgaatataggtcatctcagtttgtgcacagcac

SEQ ID NO: 603 - DNA, 401 bp, Homo sapiens
cagagcactttgctagaaaaggcaagacaaggtgtttctgagagtgtctccgcatttagatagactatttagttccatacttagagatcatccactagggtttctttgagcttggtgaagaatattcagcaacttgcctaagctctgggaatgtgagcatcagttatgaatataggtcatctcagtttgtgcacagcacaytttctgtcagtccaatataaacttgtatgagtagatctgtttattgtgataactacaacttatattaacttgttgacatgctttttctaacttattttcttgggtctgcatttttcaaagatcaaaatttctgcatcttcagcacaagtagattgaagaacacataatacggatagtgattaggaacattcaggcatggg

SEQ ID NO: 604 - DNA, 401 bp, Homo sapiens
aataagctctgcaacttacatttttatatgggaagaaataatgagtcagtcttcttgaagttttttacattattatagtaagaacatttaagatgagatatacccttttaacactttacattttaagtgttcaatatagcattgttaactctagataggacgtttcatagaagatcttagcatctgacgtaactgaaactrcatgcatcgaatagcatctccccatttctcccacttcccagccccaggcaaccaccattcattttactctctgcttctgtgagtttgactattttacatacctcattgataatggtttggatgtttgtcctctccaaatcgcatgtagaaacatgattcccattgttggagatggggtctaatgggaggagattggatcg

SEQ ID NO: 605 - DNA, 401 bp, Homo sapiens
ccagccccaggcaaccaccattcattttactctctgcttctgtgagtttgactattttacatacctcattgataatggtttggatgtttgtcctctccaaatcgcatgtagaaacatgattcccattgttggagatggggtctaatgggaggagattggatcgtgggggcagatccctcatgaatggcttagtaccatctscttggtgataagtaagtttttgctctgagttcatgtgagatctggttgtttaaaagtgtgtagcacctccccaaccgatctcttccccttttgccttccaccatgattatgagcttcctgaggccctcactagaaatagatgctggagccgtggtggtacagcatgcaggactgtgaatcaattaaacctcttttatttc

SEQ ID NO: 606 - DNA, 401 bp, Homo sapiens
gctcttgtatattgacaagagcataaatctatcaacagccaggttcatacatagagtccacctcttaaaggttataagatactgggcaagtcatttcatttctttaaacctgtttcctcatctgtgaaatgctgatagaatcataccttacatagatcagatgtaaataaaatagtcgtaagttagcgctcaggaaattayagtattctgtgcaaatcttattaactttgattttgtttcatatattgataaatttacatctagctgaaaatacattgaatcattgtcatggactaaattttaatatgtcttaggaaaagagtccgggttgaagtgcagtggtgcgaygttggccccctgcagcctccgcctcacaggttcaagtgattctcctgcctcag

SEQ ID NO: 607 - DNA, 401 bp, Homo sapiens
ttacatagatcagatgtaaataaaatagtcgtaagttagcgctcaggaaattayagtattctgtgcaaatcttattaactttgattttgtttcatatattgataaatttacatctagctgaaaatacattgaatcattgtcatggactaaattttaatatgtcttaggaaaagagtccgggttgaagtgcagtggtgcgaygttggccccctgcagcctccgcctcacaggttcaagtgattctcctgcctcagcctcccgagaagctgggattataggtgcatgccatcagacccagctaatttttgtatttttagtagagatggggttttatcatgttgaccaggttgttctcgaactcttgacctcaggtgttctgccggcctcagcctcccaaagtg

SEQ ID NO: 608 - DNA, 401 bp, Homo sapiens
tgccggcctcagcctcccaaagtgctgagattacaggcgtgagccactgcaccggtccaggacaagaatatttttgaaactatgagctttatcatcagagacattaaaacttcagaaggaaagagacctttgagttcttctgagccaactccttccttttatcactaccaacaacatgaagtcagagggaaatgacttgcmtacagtaagatgagcaggaagaagtgaaagcagattaggggctgaggtcttcttagtttatgtccagagatctttccacttcacccaccatactctacattagtcactaccacgaccatcatcatcattatgaccaaaattaaatctaaacaacttttcaccaagtaattccattttcatgctaaagatcaggcagttca

SEQ ID NO: 609 - DNA, 401 bp, Homo sapiens
ggggagaagggacaggaagtactgagatctgaaagcaaattgcctaacatttagaggtgagaatgtgaaatgaggccaaccagggctggtgcagagccagaacaagggaggtcagaaagctaaggtgaaattctggaaataaatatgatgagagcttattgtaggggagacttttgggggactatggcctcgatctgatgkgtctgcttgtccccagtgctccttcaaacatgctccttgaagcttcatgcctgccttagacagccagagattgaaaatgaacatatattttgaaaacaaagacactaagaccattcacaaaaattcaagaagtaattttttaaaaaaaatacagtaacatttaaaaaatatatgttatttcacaacatatgtaaaaccat

SEQ ID NO: 610 - DNA, 401 bp, Homo sapiens
agagatcagactgttattgtgtctatgtagaaagaagtagacgtgagagactccattttgttttgtactaagaaaaattcttctgccttgagatgctgttaatctgtaaccctagccccaaccgtgtgctcgcagagacatgtgctgtgttgactcaaagtttaatggatttagggctatgcaggatgtgcatagcccgaraaacacccacaggtgtggaggggcaggccaccccttcaaaggcaagtgtcatgaatgaagaaattaaggatagcaacaagtataaggcctatgtcacttgcctttggacaaaggtccctttatatttcaatcctggaaagtgaaatgaaaaaactagtgctaaaattaggatcaaagatagtacaggaaagtgtatttaa

SEQ ID NO: 611 - DNA, 401 bp, Homo sapiens
acaataaaacaaaatccatgagataattcatttagtggggcaaaaaacgtttgttggtctttgttttgcttggttttgttttatatgtacaagggcataaagttgacttaggatgtggagttgggaaggagagtagtttggataagatctttgaaaggttgcttatgggtatcctttcctggtcatcaagatgtggatgtrcctctcttgaaattcttactcactgcatctttcagcctggatatgatgcaaaaacatgagcggtgacttcacatttaggtttgaaagcagagcttccctcttattggctgatggttcctgaggatgtctgcagcagagtggcaggacaatctagcagaaatattttccacttaaagagatagggggtttgtgtttggatt

SEQ ID NO: 612 - DNA, 401 bp, Homo sapiens
acttccttagagcaaaggaggggcagccccattaccaaataccacttttgcccaggcttttgtgacatgcagtgctcctgcccagcatggcaccttattttgacaaggaccttgttatctttccaccaagttatcacttgaaatgataatatagcttgtatgttgttcccaagctgtcgtatattttcctggttgtttgawtttaacaatgagaataataaggtttaatactcctccctaagaaaagatttgcttatttcccaatttgaaattactttgctaagagggatataatgagttctatagtgaaacaagtatgtgttttatcctaatttctgaaattattcctgaaaattcaagtccattgtttgtctcccaccctatcctttggttctgtcacc

SEQ ID NO: 613 - DNA, 401 bp, Homo sapiens
agcctcccaagtagctgggattacaggcacacgccatcatgcccagctaatttttgtatttttagtagagacagggtttcaccatgttggccaggatggtcttaatctcctgacctcgtgatccacctgcctccgcctcccaaagtgctgggattacaggcgtgagcctctgcgccgtgccattttcagcattttttgatrtcagttatgggttcattgttttcaatataagataacatgagcagagactgtgtaggtgggattgagagtgaagactgggctcattgacaacctctcatcatctcgtcaagcagagtttcccatatcctctgaatctatgcctgtgtaactccaaatattagcataaatataaaaaattcatccatttggatattttatct

SEQ ID NO: 614 - DNA, 401 bp, Homo sapiens
atggctatgcaaatttccattcaacagcgtataaaagttccattttctcggcatctttgtcagcatttgtaaaattttttttgtctttttgataataaccatactaactagggtaagataatacctcattgtggttttgatttgcatttcccaaataattccaggaaagagatgacattgggttagattagaggggaaccrggggatgagtacaaaagatgaggagaagttagaatctattttagaaacagagtcaacagaactcaccaaatagatgcagttaaggaagcaaggaaagtaactaagggtaacacctgtttgtggcttaagtaactgaataaatgggggtaagacaatatgagacagcaaatatttggggaatattttatgtggtatttttg

SEQ ID NO: 615 - DNA, 401 bp, Homo sapiens
agtgtggcatctcatgtattctaaagtatatggtgaccatctaaggaagttggtttgaatgtgcaggtctagcaaagaacatgccctggatataaaacctaggaatcaccatctgatcgaagatggagatgaatgacttcaccctagggcaagaaggacttaagaagaataggaaggatggcaggaatggaggaaaacatkktggatggaaagatgagacactgaaacaatttgaagattggaaggtgagagtctgaggtccaaagctttacaccagttgttgaagaaccttgatcacaggccagccaggacctcaaaggctcaagagaaatgatgacaaggtttgcttggcttatttagagctgggctatagagcgggaagattgtggttaaatcttagc

SEQ ID NO: 616 - DNA, 401 bp, Homo sapiens
gtgtggcatctcatgtattctaaagtatatggtgaccatctaaggaagttggtttgaatgtgcaggtctagcaaagaacatgccctggatataaaacctaggaatcaccatctgatcgaagatggagatgaatgacttcaccctagggcaagaaggacttaagaagaataggaaggatggcaggaatggaggaaaacatkktggatggaaagatgagacactgaaacaatttgaagattggaaggtgagagtctgaggtccaaagctttacaccagttgttgaagaaccttgatcacaggccagccaggacctcaaaggctcaagagaaatgatgacaaggtttgcttggcttatttagagctgggctatagagcgggaagattgtggttaaatcttagca

SEQ ID NO: 617 - DNA, 401 bp, Homo sapiens
ctgatgacgctgcatctcagtcataaaaacttcagggaatctgaaagaaataataatgcgccatggtattttgagcttatcaccacaagaaatactctgtaattgcatcaaatgattataaatggcatattttagggacataataagcaatgcaaaggacaggtctgcttattagtgccaaaatttgtatttattcccatrttgctttttttttcctaggcattttccggcatctcatttctgactattaaattataccccaaatagaatatgtaactacatgtaaccaacctattttggtctacattaagtgcagcagcataaatagaaactgaaaataatcagaagcatttagaatttcgtttttattcatctgatttacttggccttttgtctgggat

SEQ ID NO: 618 - DNA, 401 bp, Homo sapiens
attgtatctacaaatagtttagctgaagtgagcttttcagttattgattttaaatcataagtttaattcgtcatcaaggcaacaacaaatgtgatgtttggggcagatgcaaagttgaagtatgtctaaagaaatagcacgctagttgcgtttaatgtggaaggtaaattataacaaaacaaactaaaaccccacaaactstaaagattttcccttatagttatagaaattaggaaatgccctawtgtgcatctttccttcccaactgtacygagattttgaattttttataatttgtactaatatgtaactagaccagatataatctgttgaggctttcttgtgatggaaagcaggtgaaatcaattttcagttgaaatatgcttttcagttcactatat

SEQ ID NO: 619 - DNA, 401 bp, Homo sapiens
tgattttaaatcataagtttaattcgtcatcaaggcaacaacaaatgtgatgtttggggcagatgcaaagttgaagtatgtctaaagaaatagcacgctagttgcgtttaatgtggaaggtaaattataacaaaacaaactaaaaccccacaaactstaaagattttcccttatagttatagaaattaggaaatgccctawtgtgcatctttccttcccaactgtacygagattttgaattttttataatttgtactaatatgtaactagaccagatataatctgttgaggctttcttgtgatggaaagcaggtgaaatcaattttcagttgaaatatgcttttcagttcactatatgatgtttgtagggcttttttagagaagggctttgcatttagact

SEQ ID NO: 620 - DNA, 401 bp, Homo sapiens
catcaaggcaacaacaaatgtgatgtttggggcagatgcaaagttgaagtatgtctaaagaaatagcacgctagttgcgtttaatgtggaaggtaaattataacaaaacaaactaaaaccccacaaactstaaagattttcccttatagttatagaaattaggaaatgccctawtgtgcatctttccttcccaactgtacygagattttgaattttttataatttgtactaatatgtaactagaccagatataatctgttgaggctttcttgtgatggaaagcaggtgaaatcaattttcagttgaaatatgcttttcagttcactatatgatgtttgtagggcttttttagagaagggctttgcatttagacttgagcagtttagcaggcttcgtcggag

SEQ ID NO: 621 - DNA, 401 bp, Homo sapiens
actagaccagatataatctgttgaggctttcttgtgatggaaagcaggtgaaatcaattttcagttgaaatatgcttttcagttcactatatgatgtttgtagggcttttttagagaagggctttgcatttagacttgagcagtttagcaggcttcgtcggagggtaaatctggctgctggatctagttggaatgttttcytttcataagaagagttggagataaagtgattcttgctttcaaatacacttttaacaatacaaaagaataattgaagactttttcttttgagacagagtctcactctgttgcccaggatggaatgcagcggaacaatttcgactcattgtagcctcracctctcaggctcaggtgatcctcctacctcagcctcccaagta

SEQ ID NO: 622 - DNA, 401 bp, Homo sapiens
gtcggagggtaaatctggctgctggatctagttggaatgttttcytttcataagaagagttggagataaagtgattcttgctttcaaatacacttttaacaatacaaaagaataattgaagactttttcttttgagacagagtctcactctgttgcccaggatggaatgcagcggaacaatttcgactcattgtagcctcracctctcaggctcaggtgatcctcctacctcagcctcccaagtagctgggactacaggcgtgtgccaccacatctggctaatttttgtatgttttgtagagttggggttttgctatgttgcccaggctggtcttgaactcctgggctcaagctttcctccctccttggcatcccagagtgctgggattacaggtgtaagc

SEQ ID NO: 623 - DNA, 401 bp, Homo sapiens
tctcaggctcaggtgatcctcctacctcagcctcccaagtagctgggactacaggcgtgtgccaccacatctggctaatttttgtatgttttgtagagttggggttttgctatgttgcccaggctggtcttgaactcctgggctcaagctttcctccctccttggcatcccagagtgctgggattacaggtgtaagccacygatcccagcctaattgaagacttttgtatgttaggtgctaagtaatacaaaagtaaaagtgccactgtttctgtcctcaaggaatttacagtctggagaaggagacaaaatataaacaaacacactgataagtaaatgattacaaattgtgccaagtgccatgatagaaaagaattgatgtgcattatctctgtgctccc

SEQ ID NO: 624 - DNA, 401 bp, Homo sapiens
ttgatcatacccatcagtcttccaggtataccaaggacattggattgaatgtcacaggacctggattcaagccctgccatcgaatccagctgggtgtttctgggcttcagtttctgtatattcagtaatagtatcgaatattagtgggagtaatagcattgaatgccctccatgctcactggaacttcatccacaattacmatgtcttggtggctttctaagtttttttttaatttttaatttctaatttttgtaggtacacagtaggtgtctatatttatggggtatgtgagatattttgataaaggcatgcaatgcataataatcacatcatggaaaatggggtatccatctcctcaagcatttatcctttgtgttacaaacaattcaattatgttttt

SEQ ID NO: 625 - DNA, 401 bp, Homo sapiens
acaaacaattcaattatgttttttaagttattttaaaatgtacaaatacattattttggctatagtcacactgtcatgctattaaatgctaggtcttctaattattttttgtaccctttaaccatctctacctctccctgatcccccagtacccttcctatcctctggtaaccatccttccattctctatctccatgggtycagttgttttgatttttacattcagtaaatgagtaagaatacacaatgtttgtctttctgttcctggcttatttcacttaacatgatgaccacagttccatccatattgttgcaaataacaggatctcattgttttcatgaataaatagtactccattgtttatatgtaccacaatttctttgtccattcatgtgttgat

SEQ ID NO: 626 - DNA, 401 bp, Homo sapiens
ataaacactatatttaggctacctatatttatagaaaaatcttctttcttcaataataaattaatgttagcttactgtaactttctgacttaataaatgttttaatttttcaaaactttttgactctttttcaataatagcttgaaatacaaacacattgtacagctgtataaaaataatttctttttatcctcattctayaaacttttttgaatttttaaattttttaatataatttttaaaattttgttaaaaacaaagacacaaacacacacattagcctaggcccacacagggtcaggattgtcagtatcactgtcttccacctccacatcttgtcctactggaaggtcttcagggtaaataacaagcacgaagctgtcatctcctataacaatgcc

SEQ ID NO: 627 - DNA, 401 bp, Homo sapiens
ttgggtgaattcaaacatggccactttgtatgacaaattacatgcttctatttctgttccacccagggtttcttttgagcagtggaaattcatctggaaacttaatgttatcccactatagagagccattcttgatgtgccactaattctgccaaataggctgacttgactactctcttaggatacagaattatatgaagmaaaatagagttgagaaggaaaaagtacaaacgttgtgtgtgcatataacaaacagatgactgctttagacatatttggtctgtaaacacctgtggaatcttgcctgtgtctctaatttttccagattttgctcatgggagagacacaatttgttctttgaatgtagccattatattttaacatacatgctgatttaatca

SEQ ID NO: 628 - DNA, 401 bp, Homo sapiens
cacataggcacatcatctcaggaaggctcaggtagcatagaggcaagtgaattcagcctgagattacagtaaagacatgaatctgatagtctggcatttctggactcacactgatttcttgaagaaaagcccatacagttggaatcagtgccttaaattaggtttcttaatatgatgagctcataaaatatgtgttgtccygccttcttcagatgtgagagttgatgttacagagatctctttggtaatatgactattttaataaaatattcacaattaaaaatrtatagaagaaagcagcaaggaaagactagaactaatgattagagttgttgaaaatgcatacataatttactccctttttaaaaaaaatggaactgggctattctgttgtacataga

SEQ ID NO: 629 - DNA, 401 bp, Homo sapiens
gatagtctggcatttctggactcacactgatttcttgaagaaaagcccatacagttggaatcagtgccttaaattaggtttcttaatatgatgagctcataaaatatgtgttgtccygccttcttcagatgtgagagttgatgttacagagatctctttggtaatatgactattttaataaaatattcacaattaaaaatrtatagaagaaagcagcaaggaaagactagaactaatgattagagttgttgaaaatgcatacataatttactccctttttaaaaaaaatggaactgggctattctgttgtacatagacttttgtcaaaatcaaattaagaatactttactcagttttctttttcttcctttattcatctctgtaaatatgattttaaaggc

SEQ ID NO: 630 - DNA, 401 bp, Homo sapiens
tttttaaaaaaaatggaactgggctattctgttgtacatagacttttgtcaaaatcaaattaagaatactttactcagttttctttttcttcctttattcatctctgtaaatatgattttaaaggcccttgaaaacaaaataattatcttattaaaatttagttacatgttgtgtttaaaatgctaaagttttggccagcygcagtggctcacgcctgtaatcccagtactttgcccgagatgggcagatcatgaggtcaggagttcaagaccagcctgaccaacatggtgaaaccctgtytytactaaaaatmcmacaacaacaacaacaacaacaacaaattagccaggagtggtggtgcgtgcctgtaatcccagctactcaggaggctgaggcagga

SEQ ID NO: 631 - DNA, 401 bp, Homo sapiens
atctctgtaaatatgattttaaaggcccttgaaaacaaaataattatcttattaaaatttagttacatgttgtgtttaaaatgctaaagttttggccagcygcagtggctcacgcctgtaatcccagtactttgcccgagatgggcagatcatgaggtcaggagttcaagaccagcctgaccaacatggtgaaaccctgtytytactaaaaatmcmacaacaacaacaacaacaacaacaaattagccaggagtggtggtgcgtgcctgtaatcccagctactcaggaggctgaggcaggagtatcgcttgaacccaggaggcggaggtcgcagtgagccgagattgcgcaacagagtgtgactcagtcttaaaagaaaaaaaaaaattctraaatttatc

SEQ ID NO: 632 - DNA, 401 bp, Homo sapiens
ctctgtaaatatgattttaaaggcccttgaaaacaaaataattatcttattaaaatttagttacatgttgtgtttaaaatgctaaagttttggccagcygcagtggctcacgcctgtaatcccagtactttgcccgagatgggcagatcatgaggtcaggagttcaagaccagcctgaccaacatggtgaaaccctgtytytactaaaaatmcmacaacaacaacaacaacaacaacaaattagccaggagtggtggtgcgtgcctgtaatcccagctactcaggaggctgaggcaggagtatcgcttgaacccaggaggcggaggtcgcagtgagccgagattgcgcaacagagtgtgactcagtcttaaaagaaaaaaaaaaattctraaatttatcgg

SEQ ID NO: 633 - DNA, 401 bp, Homo sapiens
tgattttaaaggcccttgaaaacaaaataattatcttattaaaatttagttacatgttgtgtttaaaatgctaaagttttggccagcygcagtggctcacgcctgtaatcccagtactttgcccgagatgggcagatcatgaggtcaggagttcaagaccagcctgaccaacatggtgaaaccctgtytytactaaaaatmcmacaacaacaacaacaacaacaacaaattagccaggagtggtggtgcgtgcctgtaatcccagctactcaggaggctgaggcaggagtatcgcttgaacccaggaggcggaggtcgcagtgagccgagattgcgcaacagagtgtgactcagtcttaaaagaaaaaaaaaaattctraaatttatcggagaaaacaatt

SEQ ID NO: 634 - DNA, 401 bp, Homo sapiens
attttaaaggcccttgaaaacaaaataattatcttattaaaatttagttacatgttgtgtttaaaatgctaaagttttggccagcygcagtggctcacgcctgtaatcccagtactttgcccgagatgggcagatcatgaggtcaggagttcaagaccagcctgaccaacatggtgaaaccctgtytytactaaaaatmcmacaacaacaacaacaacaacaacaaattagccaggagtggtggtgcgtgcctgtaatcccagctactcaggaggctgaggcaggagtatcgcttgaacccaggaggcggaggtcgcagtgagccgagattgcgcaacagagtgtgactcagtcttaaaagaaaaaaaaaaattctraaatttatcggagaaaacaattgg

SEQ ID NO: 635 - DNA, 401 bp, Homo sapiens
aaaccctgtytytactaaaaatmcmacaacaacaacaacaacaacaacaaattagccaggagtggtggtgcgtgcctgtaatcccagctactcaggaggctgaggcaggagtatcgcttgaacccaggaggcggaggtcgcagtgagccgagattgcgcaacagagtgtgactcagtcttaaaagaaaaaaaaaaattctraaatttatcggagaaaacaattgggatctatttttagtctcaaatgtaggcatatacaaaaataatacatagtagttttctaagtactattagacatttgtttcccattttgccatttgctttcagtttacctgacatgaagataaaaatgatagctatttctcacttggcatttgaaagacaagagcaataagaaaccc

SEQ ID NO: 636 - DNA, 401 bp, Homo sapiens
tgctctgtaacatgattaagggcaattaacattgcaggtagaattaaagttactattttagtccatttgtgctgctataacaaaatgcctgagactgggtatgtataaagaacagaaatttgttttctgttctggagcctaggaagtccaagatcaaagtgccagcaggttccatcatctggtgagtactgcatcttcagrggggaggggaaaggaacagtatgttctcacctggcagaagaacaaaagagcaagctaccaaacactgccaagcctcttttatagaggccttaatcgcattcgtgagggagcagccctcatggcctaattacctcttaaaggctctatctcttaaaactactaggttggcaacacctgaatttaagagggggcataatcaa

SEQ ID NO: 637 - DNA, 401 bp, Homo sapiens
taataatttgtcaaggcagcaataaaaaaccaatgcagcaaaagacaataacgtctgtttaaccacacagtcacggaacatctattaactagcaacttattaaatacagcttactgctgcaacatctttggtgtaattaaaacatcctccatgaatcagagtgagaattatacttaagtgtctgccaattgccatgataakagaaaagcttatgatctctctactaagtaccttaggaagacaagggcccaatgatatgagcagtgtggtggaaccccaaacatcttcccactttcatgcacacatatcattcattctcctttttcccaaggttcgctgttagtatagaggcacaatagatcatgattagctctgggcatgttcacagtttagctgcctga

SEQ ID NO: 638 - DNA, 401 bp, Homo sapiens
atgccgcaaaaagtaaatgtttactccaagccaggtgcttggactctaaagaactctattaggcaagagtaagtggtttaattggctcaccttcattcaactgttagtatgttcctcataagtgcctgtcagagagaatcttttgtgtttcccttctaacagctggctcataaaaacataaactcatcttacaatgttaartaaggatcttttaattcctgttttctttcctccaatttgtattaatatgataggagagaaagaaagtgaaagcatgcttctatagctggctacttcatcaaacttaatggaaccatattttgtaattcattctataatttaagttttggtcattttatctcttaaagatgaattccaggccaggtgcagtggtttgtgcc

SEQ ID NO: 639 - DNA, 401 bp, Homo sapiens
ggtgtgatggtatatgcctgtagtcctagctactcaggaggctgaagtgggaggattgcttgagcccaggaggtccaggttgcagagagccatgatgatgccattgcactccagcctaggcaacagagcgagacactgtctcaaaagacacacaaacaaaaaaatatgaaaccctagctaaacactgtggactcaaaatamcctgtgaaatcacccaaccgtagtatttatctatgagaatgtttcaaagggagatatgtagttgtatgactatttcacgcagatatttgttattaataaaagactttgtggtcagcatgacgtgttagctacagttgaatccatgcttctttacattttgtggtttggttgttgtcgaatttactttccatgcattattt

SEQ ID NO: 640 - DNA, 401 bp, Homo sapiens
aaaagtttatgactagttgggtttggtctccattttgtattaatgtagttgggttcagtctccaatctgtatgtatgtagtttcctatcccagagagcaggacaagaccatataagctctatttatgtttcctttgactctttagctgaaagcctaggatgtaggacaagtggctaacctgttttagaactttcttcctasgctaacattctgaacttggccttgtggattttacctcttaaactgcaccaaaaaccatggaaacaaagggcttacagcagtgttagcctaatctgagccctctataccttcctatactgtggccacagcagtaaagctacgtggtcttgcaaaagaccttccaagagaaggttggctacagaccttgcttatcacaccat

SEQ ID NO: 641 - DNA, 401 bp, Homo sapiens
tgaaccctactctgttgggtggaatgtgtgtgtatctgcacgtgtgtgtgtgtgtgtgtgtgtgtgtgtgtttagaaattcaaaaaaaatgaggagatcttggtcttccatagagggaagactgcattatcaatagagtctttcttagcagaggatgaaggctcctgtagctcctaatcttcccatttgtgcacaaatacstgaattctgattaggttgaaatcaggaagacactcttttgctgcttagtggccacatctagagctaacaacattatcagtgggatggtgattcatggtttaagaacataccctcgccattccagctactcgggaagctgaggtaaaaggatcgcttgagcccagagtttaaggctgtagtgtgccatggtaacacataac

SEQ ID NO: 642 - DNA, 401 bp, Homo sapiens
tcattgatggtgtgtgatttcacaagctggattttatttcagaacacctgtcaaattcagagctgtctgaagcttctccaacatcattaccccagggctcccagttctatgcacatgtttttataatggcaggaaaaagaattcatatacgcatttgtgtgttagaatcagtggtgtgctggtgtaacaatcagctcctaragggtgaggcagggtgggtaggggatgtttagaaaaagtgggtatggagaagtccctgaattctagtttttgccaaattctgtgatgcaaatactcccaccacagccaatttcaaggttatttttcccagttacatttaatcagggccatacaagatgttacaagaaagaaaatgacaggaacccatgtggttcaactga

SEQ ID NO: 643 - DNA, 401 bp, Homo sapiens
acattttgcatccctttttgatgtctacaaatgtggcatttgtcagatgtgagatagttaagtgtgtgtgtgtgtgtgtgtgtgtgtatatatatactttatatatgtatatatacatatcctatgtgtgtgggtatatatatatatatatatatatatatatatatatatgaatgatgcatggagagatatctcttcccwtgcatccaaaatattcacaacttttcactaatatctgaataacatttgaaaaattgacaactcttctggctaaagatcagcatacacattcgttccacagagacttgtgccaaaatcttgctcagctcaaggggtactgcacaataaacaataagaaacttttataactccgactaatagaactcattgcttttccagtt

SEQ ID NO: 644 - DNA, 401 bp, Homo sapiens
ggcttttggacaaataacaggcagattctttggtgaagctttgttcatctgaaactcttccctgtcctctcttctccacttcatttttctgatgaggagaatggaagtttgtataaactagagtgctcaagcagcaggcagtggaagaggcaagacctccaagtagatctgcaagctctgaaccaagtgacctatctctargccatawtgaggaaggccaatgcarktttgcgatctctctacctcttcatttttccttttcctcctccccttccccttttgctctccccctcttcctctcaagagagtaatgtgctagtagtacctgatggtaccccagtgcttcctgccttcctcccttccacttcctgccttcctttctcccacttcctgccttcctc

SEQ ID NO: 645 - DNA, 401 bp, Homo sapiens
ggacaaataacaggcagattctttggtgaagctttgttcatctgaaactcttccctgtcctctcttctccacttcatttttctgatgaggagaatggaagtttgtataaactagagtgctcaagcagcaggcagtggaagaggcaagacctccaagtagatctgcaagctctgaaccaagtgacctatctctargccatawtgaggaaggccaatgcarktttgcgatctctctacctcttcatttttccttttcctcctccccttccccttttgctctccccctcttcctctcaagagagtaatgtgctagtagtacctgatggtaccccagtgcttcctgccttcctcccttccacttcctgccttcctttctcccacttcctgccttcctcccttcca

SEQ ID NO: 646 - DNA, 401 bp, Homo sapiens
ttctttggtgaagctttgttcatctgaaactcttccctgtcctctcttctccacttcatttttctgatgaggagaatggaagtttgtataaactagagtgctcaagcagcaggcagtggaagaggcaagacctccaagtagatctgcaagctctgaaccaagtgacctatctctargccatawtgaggaaggccaatgcarktttgcgatctctctacctcttcatttttccttttcctcctccccttccccttttgctctccccctcttcctctcaagagagtaatgtgctagtagtacctgatggtaccccagtgcttcctgccttcctcccttccacttcctgccttcctttctcccacttcctgccttcctcccttccacttcctgccttccccagt

SEQ ID NO: 647 - DNA, 401 bp, Homo sapiens
tctttggtgaagctttgttcatctgaaactcttccctgtcctctcttctccacttcatttttctgatgaggagaatggaagtttgtataaactagagtgctcaagcagcaggcagtggaagaggcaagacctccaagtagatctgcaagctctgaaccaagtgacctatctctargccatawtgaggaaggccaatgcarktttgcgatctctctacctcttcatttttccttttcctcctccccttccccttttgctctccccctcttcctctcaagagagtaatgtgctagtagtacctgatggtaccccagtgcttcctgccttcctcccttccacttcctgccttcctttctcccacttcctgccttcctcccttccacttcctgccttccccagtc

SEQ ID NO: 648 - DNA, 401 bp, Homo sapiens
ctggatcccttccttataccttatacaaaaattaattcaaggtgattaaagacttaaatgttagacctgaaaccataaaaaccctagaagaaaatctaggcaataccattcaggacataggcatggacaaggacttcatgtctaaaacaccaaaagcaatggcaacaaaagccaaaattgacaaatgcgatctaattaaaytaaagagsttmtgcacagcmaaagaaactaccatcagagtaaacaggcagcctacagaatgggagaaaatttttgcaatctattcatctgtcaaagggctaatatccagaatmtaacagtgaactcaaacaaatttacaagaaaaaaacaaacaaccccatcaaaaagtgggtgaaggatatgaacagacacttctcaaa

SEQ ID NO: 649 - DNA, 401 bp, Homo sapiens
cttccttataccttatacaaaaattaattcaaggtgattaaagacttaaatgttagacctgaaaccataaaaaccctagaagaaaatctaggcaataccattcaggacataggcatggacaaggacttcatgtctaaaacaccaaaagcaatggcaacaaaagccaaaattgacaaatgcgatctaattaaaytaaagagsttmtgcacagcmaaagaaactaccatcagagtaaacaggcagcctacagaatgggagaaaatttttgcaatctattcatctgtcaaagggctaatatccagaatmtaacagtgaactcaaacaaatttacaagaaaaaaacaaacaaccccatcaaaaagtgggtgaaggatatgaacagacacttctcaaaagaagaca

SEQ ID NO: 650 - DNA, 401 bp, Homo sapiens
ccttataccttatacaaaaattaattcaaggtgattaaagacttaaatgttagacctgaaaccataaaaaccctagaagaaaatctaggcaataccattcaggacataggcatggacaaggacttcatgtctaaaacaccaaaagcaatggcaacaaaagccaaaattgacaaatgcgatctaattaaaytaaagagsttmtgcacagcmaaagaaactaccatcagagtaaacaggcagcctacagaatgggagaaaatttttgcaatctattcatctgtcaaagggctaatatccagaatmtaacagtgaactcaaacaaatttacaagaaaaaaacaaacaaccccatcaaaaagtgggtgaaggatatgaacagacacttctcaaaagaagacattt

SEQ ID NO: 651 - DNA, 401 bp, Homo sapiens
ttatacaaaaattaattcaaggtgattaaagacttaaatgttagacctgaaaccataaaaaccctagaagaaaatctaggcaataccattcaggacataggcatggacaaggacttcatgtctaaaacaccaaaagcaatggcaacaaaagccaaaattgacaaatgcgatctaattaaaytaaagagsttmtgcacagcmaaagaaactaccatcagagtaaacaggcagcctacagaatgggagaaaatttttgcaatctattcatctgtcaaagggctaatatccagaatmtaacagtgaactcaaacaaatttacaagaaaaaaacaaacaaccccatcaaaaagtgggtgaaggatatgaacagacacttctcaaaagaagacatttatgcaacca

SEQ ID NO: 652 - DNA, 401 bp, Homo sapiens
gacataggcatggacaaggacttcatgtctaaaacaccaaaagcaatggcaacaaaagccaaaattgacaaatgcgatctaattaaaytaaagagsttmtgcacagcmaaagaaactaccatcagagtaaacaggcagcctacagaatgggagaaaatttttgcaatctattcatctgtcaaagggctaatatccagaatmtaacagtgaactcaaacaaatttacaagaaaaaaacaaacaaccccatcaaaaagtgggtgaaggatatgaacagacacttctcaaaagaagacatttatgcaaccaaaagacacatgaaaaaatgctcatcatcactggccatcagagaaatgcaaatcaaaaccacaatgagataccatctcacaccagttagaatgg

SEQ ID NO: 653 - DNA, 401 bp, Homo sapiens
cccatttcattctgaaggtcaaggacaacttaggtaaagggcagtgactaagaaagaccaccctggtcaggctcgatggctcacccctgtaatccaagcactttgggaggctgaggcaggcagatcacttgaggttagcagttagagaccagcctgaccaatatggtgaaaccctgtctctactaaaaatacaaaaattarctgggtgtggtggtgcaagcctgtaatcccagctgctctggaggctgaggcaggagaatcacttgaaccctggaggtggaggttgcagtgagccaagattgcatcattgcactgcagcctaggtgatagagtgagactctgtctcaaaaaaatagaaagatcattctggcttttgggtggagaatagactgtccatgggc

SEQ ID NO: 654 - DNA, 401 bp, Homo sapiens
aaagccagggttgttaagtagtatgtctcaatcaacatactcaaagtctgtgaaccaaaggcatagtcttaggcttcctcttatagtctagcatgatattattctatttcatctttttttatatgtttgctcccttgagtgttttagaatgagactgctagattttatgtttctaaagctggttttctaccaggcctgttytcagaacattctttttttttttttttttttttttttttttttttwaagatagagtcttactctgtcacccargctggagtgcagtggcgcgatcttggctcactgcaaccttcgcctcccgggttcaaacgattctcctgcctcagcctcctgagtagctggaattacaggcgcccaccactaaccccatctaatttttg

SEQ ID NO: 655 - DNA, 401 bp, Homo sapiens
gtctgtgaaccaaaggcatagtcttaggcttcctcttatagtctagcatgatattattctatttcatctttttttatatgtttgctcccttgagtgttttagaatgagactgctagattttatgtttctaaagctggttttctaccaggcctgttytcagaacattctttttttttttttttttttttttttttttttttwaagatagagtcttactctgtcacccargctggagtgcagtggcgcgatcttggctcactgcaaccttcgcctcccgggttcaaacgattctcctgcctcagcctcctgagtagctggaattacaggcgcccaccactaaccccatctaatttttgtattttttagtacaaaatgggatttcgccataatggccaggctgg

SEQ ID NO: 656 - DNA, 401 bp, Homo sapiens
gcttcctcttatagtctagcatgatattattctatttcatctttttttatatgtttgctcccttgagtgttttagaatgagactgctagattttatgtttctaaagctggttttctaccaggcctgttytcagaacattctttttttttttttttttttttttttttttttttwaagatagagtcttactctgtcacccargctggagtgcagtggcgcgatcttggctcactgcaaccttcgcctcccgggttcaaacgattctcctgcctcagcctcctgagtagctggaattacaggcgcccaccactaaccccatctaatttttgtattttttagtacaaaatgggatttcgccataatggccaggctggtctcaaacacctgacctcaggtgatct

SEQ ID NO: 657 - DNA, 401 bp, Homo sapiens
tatgcatccctcaatcccctccctcttctgcatattttgaacttgcaaagccttctgatattttaagcagaaggttgcaaatgcttgtcctactgcctggccaagtcttaggtaaaaattgtcacctaaccacatcctcagatcatttcccctgtactctagatcactaagcgcatgtgcacacacacgcatgcacgcgcrcacacacacacacacaccatccaggatcctcctgaggatgaatgaatattcctgggccaaatattgcatgaggatttgggcaatgttttggctagttgaacaacaacaatgctcatatttatgccaattggcaggaccattgcttgatcatcctgtacttggtgaagggcattttttattgtttccttttttgtttgttt

SEQ ID NO: 658 - DNA, 401 bp, Homo sapiens
taaattagttaatgacagggctctcttattcttaaacctgtcatttcccctaaactatgttgttttcctaaagtgagattaaaagtttgaaaacaaaggaacaaaatgttcatttatttactacgtttctgaaaacttgcatatatcttaatatatatatatatcttatttatatgtcttatttcattgttatgaaaacckagctttctttccttctatcctttcaatattatgctacttgtatttagtatttacattgtatgattcaaaatattgttcactgcagagccaagtagtagactatgaccgctctgcttattttgaacaatcttttatttttttctggagttgataattgcttcagatttttgtctggctttttataagcctgttgataattt

SEQ ID NO: 659 - DNA, 401 bp, Homo sapiens
taaaattctctcattgttttaaactttttttttgagtggagtttcactctttttgcccatgctggagtgcaatgacacgatcttagttcactgcaacctccgcctcctgggttcatgtgattctactgcctcagcctcctgagtagctgggattacaggtgcgcaccatcatgcccaactaattttgtattttttgtagakacaggatttcaccatgttggccaggctggtctcaaactcctgacctcagatgatctgcccgtctcagcctcccaaagggctgggattacaggcattagccactgcacccggcctgttttaaacatttaatggactcaccagggaattttcttgtcttattactttgataatttcctccactccattttccctctaatatt

SEQ ID NO: 660 - DNA, 401 bp, Homo sapiens
tttttttttttttaggactagatggaggtaagggaaagtgtgagacaataaaactggcaaccagaaacagaagaagaaaggaagagagaaaggaatctacggagtgtggaagttttaggagtaaatttctatataagttgcaaaattttagtaattctttagttcttatttcatttattcacttattttttttttcttttkagacagagcctcactttgtctggagtgcagtggtgcaatcttggctcatgcaacctctgtctcccagcttcaagcagttctcctgcctcagcctccccagtagctgggactacaggcaccagctaactttttttatttttagtagagatgggatttcaccgggttggccaggctggtctcgaactcctgacctcaagtga

SEQ ID NO: 661 - DNA, 401 bp, Homo sapiens
ctattagggaaaatacacgaaaacaaatataaaacaataacaaattaagtaactaattaaataatgtgtggcatggaaataaatgaaatactgtgcaaccttcgaacaccattttatagaacaaataatcattggagaagtagacgtgatatgttgttaagtaaacatatcatataaatggcttagaggcttagagatgtrtaggaaaggaaatactctaaaatgttaacaagaatggtatctctggtgcaattaaaagtctttttaatttggatgggtttttttatattttacaaatatttctgcattgattctacattacttatgtaatcaaaggtgcccaatacgtgttacttaaagaatctcttcaataattagaacgtaggcactcaatgctcatt

SEQ ID NO: 662 - DNA, 401 bp, Homo sapiens
tagcagagagctcatgatcgtccatctaactcccacaccatcttggagagccacagggtatcctacattatcctgctgaagatccttcagtacctaatggctctcgtgaagcattccaaagtgaaagtcatggagcctatgccactaaatcagatataactagatacatgttggattaaaaggaaaggaggaaaggcatakaagggaaaaacagagattattggagaccaaatacctctataaattctcaaaatttgtttaaaggctttactttttcaagatgcatattttggcaatagcttacgaagactgaagttttcttatttaatcttagagatactaatacttagaaaagaaaagtcttctatcttgttgaccttctctgtagccatttgaaatct

SEQ ID NO: 663 - DNA, 401 bp, Homo sapiens
gtattatattggtgcaaaagtaatgcagtttctgccatttctcttaatgccattactcgtaagggcagaaatgaccattacttttgcatcaacctaatacctccagattttagatatttgagtgccattgcttgatatatcttttgttttttcttctggaaattttggttactttagttgcataaaggatgacttccattwtaccctgttaagcatctctgtctggtcagaagctactactctgttctttctagttcagtagggaacaatcagtttccttctcaattttcagctaatctttatgaatgaaatttgattaaatctagcaaaactatgcaaacatcataacagcatatggggagccttcctgtagtaccagtgggctatttccgtctaataac

SEQ ID NO: 664 - DNA, 401 bp, Homo sapiens
cttcctgtagtaccagtgggctatttccgtctaataacagattcaaaaaatccaattagacagtttgaaaaaagaaagccagagttaaaaatatctgactgtttgactgagaacagcagggaatggtttataggccaatcatttatggtgaataggatcttagtggtgagcaactcacatctctagcccattagaataatktgttactcatattgctcctaaagctttctacttaattataccaagttaaatagcagacattctcactcccttttgatggaaaatcacatttattcacccacacaataccatccttgggtgttaagggatgagagttgacctaatgggaagacaaacaaatggtttaggaaatgagacatgatttttttacacaaaggtta

SEQ ID NO: 665 - DNA, 401 bp, Homo sapiens
gccaggctggtcttaaactcctaacctcaggtgatccgcccacgtcggcctcccaaagtgctgggattacaggcgtgaaccaccgggcccagccaagtgttttaatttttaaaaactatttgaccatatgaaaatatagatgttccattaaatatatatagcctaagaaatataatcagcaatgcagtaaaagattatgtrtacggatgctcctgacagttggatttacaatagggaaaagctggaaacaacctaaatatttgaaaaaagagaatggtaaatacatcaaaaatacaataaatacagtgttaagtgaaaagtttgtgcaattttgacttgagaaatttttaatgtactatgactacttggaagaatatggatgtacctcaaaataagtaatg

SEQ ID NO: 666 - DNA, 401 bp, Homo sapiens
taaaatgggttatacctatcatttttttcatattagaaattaaaactgagaaatgtttgaacacaggaatacccaagtacatattccagtgatcagcagagcaatggcatcatcacatcatattgcctccagaaaatcccactgacaatttgttgaagactaaaagggaaaaagccaaacaccttagtatgctgtaaaaayagctttcatctcacagacctcccgaaagggtcttgaagatccatgagcaatccctggaccacactttgagaaccgcttttgtaacgtgtgaccttcccttatcctctgccatgcraaactatctcagaatctaagattgtctacagccacggtacaaccagctctgagactttgaagagaagaaaagatgaacttcatca

SEQ ID NO: 667 - DNA, 401 bp, Homo sapiens
catcatattgcctccagaaaatcccactgacaatttgttgaagactaaaagggaaaaagccaaacaccttagtatgctgtaaaaayagctttcatctcacagacctcccgaaagggtcttgaagatccatgagcaatccctggaccacactttgagaaccgcttttgtaacgtgtgaccttcccttatcctctgccatgcraaactatctcagaatctaagattgtctacagccacggtacaaccagctctgagactttgaagagaagaaaagatgaacttcatcactaaaaaagccaaagtagttgaaagcaaacactagcygaattttcttcctccaagcctacagaccacctcacgtagtagctgtagtgggagctgctcccaagatttgataagaat

SEQ ID NO: 668 - DNA, 401 bp, Homo sapiens
agatccatgagcaatccctggaccacactttgagaaccgcttttgtaacgtgtgaccttcccttatcctctgccatgcraaactatctcagaatctaagattgtctacagccacggtacaaccagctctgagactttgaagagaagaaaagatgaacttcatcactaaaaaagccaaagtagttgaaagcaaacactagcygaattttcttcctccaagcctacagaccacctcacgtagtagctgtagtgggagctgctcccaagatttgataagaattagtaaagaggtttataagaccgtgtgtgcagagtctcacagttgctgatacttgttgggcttagctttatctctgtctacagtagcagcccaggacaaaacattcatatgatattctctct

SEQ ID NO: 669 - DNA, 401 bp, Homo sapiens
catttctcagagataactgtgttagcattttggtgtgtttcttatagccctttttgttgtcaaaaataagcaaagataaaggggaaagattttgttctgtttcttttttctatatacacagtatatcttggagatagtttcaagtgccaaatacatgcatttatttttttcacagaatgcaagtcatgtcatagcatggaygaagttgggtttatttaatcattcactagttggcaggtatttaggttgtttacagtttttccattttagaaacagtgttcccatgtaaagaatgtcccttgtgcataaatcgttgtgacatgtgttggaatctcaaaagtggaattgctgagccaggggcatcctcattttaaaatttaatagacatcatcattatcctc

SEQ ID NO: 670 - DNA, 401 bp, Homo sapiens
ttgccacctttaacacagggatattaggtaacttaagaggtaaatgtgtgtttcttgaatcccagatctaccacttaaaaattatgtaaggtttgatttactgattcatttttcctgccccaccaacttcatgaccataaaataggggcaggggagaaggaaatgataagacttagcatattataccatatggaaattaartaatacacataaaatacttaaaatagygtcaggcaatttaagagcactcagtaaagttagctcttattaaatttttgcaactccatgtatacctgggatctgtttctggtttgttcatggcagcattgtcaactaaaactttctgtgctattcagtgtgatagttattggacacaatgaccactgaaaacatggctagaa

SEQ ID NO: 671 - DNA, 401 bp, Homo sapiens
gtaacttaagaggtaaatgtgtgtttcttgaatcccagatctaccacttaaaaattatgtaaggtttgatttactgattcatttttcctgccccaccaacttcatgaccataaaataggggcaggggagaaggaaatgataagacttagcatattataccatatggaaattaartaatacacataaaatacttaaaatagygtcaggcaatttaagagcactcagtaaagttagctcttattaaatttttgcaactccatgtatacctgggatctgtttctggtttgttcatggcagcattgtcaactaaaactttctgtgctattcagtgtgatagttattggacacaatgaccactgaaaacatggctagaatgatgggaaaattaaaattttaattaa

SEQ ID NO: 672 - DNA, 401 bp, Homo sapiens
tattaaatttttgcaactccatgtatacctgggatctgtttctggtttgttcatggcagcattgtcaactaaaactttctgtgctattcagtgtgatagttattggacacaatgaccactgaaaacatggctagaatgatgggaaaattaaaattttaattaattttaatttaaagataaacagccacatgtggtcagtargtaccatattggacaggagaatgcccatatagtattttccatgagctttcatgagttatgctttattatataaaccagattttatttaagaactcatatggactagattatgaattttatgagatgattttccttgagtcatcaagaagaacacagtttttttctttaatctgttaaagttgggaagtattaatataaat

SEQ ID NO: 673 - DNA, 401 bp, Homo sapiens
tagttcctacttgaaatcaacattccagcaataaaccttattggttcttgttattctttgacctcacggttaaatttgatttgctaattttggttagagctcttctatattcatatttgagattattttaaatttgcattgtgcattgactgtgagatgagtattttgttggcttggtaaaatgaattaggagacttcatrttctaaattctgaaatagtttgaatattggagttattatctgttcttgggagatggtttttatcaccagttcccctaaactcctttttaccttgaggtaaagcaaagtctaccttactatttcttgtatggtgattggctattcaggttttctatctattattaagacaattttgaactcactggtgctccaaagaaaat

SEQ ID NO: 674 - DNA, 401 bp, Homo sapiens
aggttcagcaacttgcccaaggtctcacagttgtaagggacagagtctgaatctattgcctctatacttaatcaataaagattcattatatgcattagctcatcaaaggttctaagatgtctagagtaaggaaaatttttgactttgtttaaataaccatttcctggaagcaccatcgaaaacattggtagttgcagggtrcagtggctcacacctgtaatcccagcaatttgggagaccaaggcaagaggataacttgagcccaggagttcaagccccatctggccaacatggtgaaaacccgtttctactaaaaatacaaaaactagccaggctggtggtgtgtgcctgtagtcccagctacttgggagtttgaggcaggagaattgcttgaacctggg

SEQ ID NO: 675 - DNA, 401 bp, Homo sapiens
gaaaacccgtttctactaaaaatacaaaaactagccaggctggtggtgtgtgcctgtagtcccagctacttgggagtttgaggcaggagaattgcttgaacctgggaagcagaggttgcagtgagccgatatcatgccactgcactccagcctgggagacagagcaagactctgtctcaaaaaaaaaagaaaaataaaggkrgggtgttttatatttatatctacataaatctatacattatctagatattatactatattatggaaatgtatatattatattagaattaatatttctaattatcgtatacagttatacattttattgtgttattataacatattatatataatwggttctgtttttctgaagagccataaataatgcattcaatttagaa

SEQ ID NO: 676 - DNA, 401 bp, Homo sapiens
aaaacccgtttctactaaaaatacaaaaactagccaggctggtggtgtgtgcctgtagtcccagctacttgggagtttgaggcaggagaattgcttgaacctgggaagcagaggttgcagtgagccgatatcatgccactgcactccagcctgggagacagagcaagactctgtctcaaaaaaaaaagaaaaataaaggkrgggtgttttatatttatatctacataaatctatacattatctagatattatactatattatggaaatgtatatattatattagaattaatatttctaattatcgtatacagttatacattttattgtgttattataacatattatatataatwggttctgtttttctgaagagccataaataatgcattcaatttagaag

SEQ ID NO: 677 - DNA, 401 bp, Homo sapiens
ggagacagagcaagactctgtctcaaaaaaaaaagaaaaataaaggkrgggtgttttatatttatatctacataaatctatacattatctagatattatactatattatggaaatgtatatattatattagaattaatatttctaattatcgtatacagttatacattttattgtgttattataacatattatatataatwggttctgtttttctgaagagccataaataatgcattcaatttagaagacaaactcttttagttggaatgagcctaataaaaataattaccatcccaagccaactttaggttattatttgtctctgacagtattaaattatcattatattaaattcctagaagcactatagaaatggcagcagagtatttatattatatat

SEQ ID NO: 678 - DNA, 401 bp, Homo sapiens
agagtatttatattatatataatataggttatattattagatattaatatattacattacaattgtattatcatgatattatatataaattggttctgtttctcttgacaaccttactaatacatccagtttagaacataaattctattagttggaatgagcctataaaaataattaccattccaaaccaactttaggttrtcatttgtctttgatattattaaattattattattttaagttcctaggagcacaatagaaatgctggcagagtgtttatattaaatataatataaattatatttttagatgtaaatatattactttatgatgacattattgtgatatatatataatataatgagttctttttccctggagaaccttaactaatacatcta

SEQ ID NO: 679 - DNA, 401 bp, Homo sapiens
agaaaagggagaggtaaaagctcccaggaaagtctagtgcccagccaaaggccatgggagtgatgagtgaccctgcccacacctaacggagcgtcccctgctctgctagtcagtcaacagaacaccagccaatttctctaagccaagagctggttatttccaacctcccctggaagagtttacttaataccataagaagtmattttctcttccatctactgcaagaaaaaactggatattgcaattgccatcctttttgagttaaaatactctacatttttaaacaaataaataaaaaagcttaaccattttgaaattaccagtagggaagaaatcgggtgaaaaaggagaggaaccatgcattactgagaatactcctgtcccaaatctctctccatatc

SEQ ID NO: 680 - DNA, 401 bp, Homo sapiens
tgtataccttaccacctatttgaaaaatgatggatagttatcttaaacggtgaagaattagtgtaagttcttaaacaaaatagtggcgatattaagatcatgcttgagaaacctaattcttgctgtctccttacatattttaagtttggcctaactctgtctctgtgcatagtgagctgtaatgtaactggatgtgtaaayagattgtagcctactcttgtgccaatctccaagttttggccaatcaaaggtggccaaccattcaaaccatgttcaagtaaggcaaacatcaagctgtaaccaacccaactatttttgtaccttgcttccattttccatatgtcacttttctttttctgttcataaattctctcctaccacgtggcatcacgggggtgctc

SEQ ID NO: 681 - DNA, 401 bp, Homo sapiens
ttgtaccttgcttccattttccatatgtcacttttctttttctgttcataaattctctcctaccacgtggcatcacgggggtgctctgaacctcttctggttctggggctgatccattcatgactcattctttgctcaattaaagtctgataatttaatttgtctaaagttttccttttaacacgaccaagagtcacagaytgcttagtctggagaagctactcttggctctatgcagtccacaaaaaatgacatttagaaatggttttccttccctggtctccagagaagcagcggctttcatactctgaaatgcagcatcctcatctgtaagatgcaggtgctaaatgatgactgttgttctttcaaatgttaactttctatgagtcacttcttcattg

SEQ ID NO: 682 - DNA, 401 bp, Homo sapiens
tttcatactctgaaatgcagcatcctcatctgtaagatgcaggtgctaaatgatgactgttgttctttcaaatgttaactttctatgagtcacttcttcattgtatgtgtcaagaagcacaacctcgaaagcctgcctttgacaatgcttagaggttagaggatgccaaatgagcctcatcttctttggctactgagttartaaccatccttcatttatctcagggagcaaaggcaggatttccgtgggtgtccaaggtccttactcacagtcaggatgcatggcagtacccttaataactacagattcagaatcacagaagacatttaccgartatgtattttctgccaaaccctgtgccaggtgttattagaacattacttatgaaatatttggtagtg

SEQ ID NO: 683 - DNA, 401 bp, Homo sapiens
tgcctttgacaatgcttagaggttagaggatgccaaatgagcctcatcttctttggctactgagttartaaccatccttcatttatctcagggagcaaaggcaggatttccgtgggtgtccaaggtccttactcacagtcaggatgcatggcagtacccttaataactacagattcagaatcacagaagacatttaccgartatgtattttctgccaaaccctgtgccaggtgttattagaacattacttatgaaatatttggtagtgtggatgaagaggcagcttttcctgcttacacaatacagaaatatgatttcaaaaatctattaaaattttattaatctcagaaggcatgatttctaattgtgtttgatcttacacttgttatgatttaggaatt

SEQ ID NO: 684 - DNA, 401 bp, Homo sapiens
aacattacttatgaaatatttggtagtgtggatgaagaggcagcttttcctgcttacacaatacagaaatatgatttcaaaaatctattaaaattttattaatctcagaaggcatgatttctaattgtgtttgatcttacacttgttatgatttaggaattcacatctgagttggttgcatgatgctatagttggcaacaygattctgaccgccaccatcacaaatagaggttagaaaatattacttatgtgaaaataaatgccatttctggcacctaaaacagctcttttctcaccttcctatgatgaggttttattgagcttttgcaggaaagaaaagaaagaaatctgcattcaggtttcaggagtaaagaggctgctcattaacaaagccgtttcaa

SEQ ID NO: 685 - DNA, 401 bp, Homo sapiens
accacgaatacatgccctattactaaaatcactgtcatttctatgcttttcttctcccttcaatcacataccacccagttttcagttcctataattgccaaaagccatttatgaatctgccttattgtatgggttacaaacgtctattttcctgctctgttcatacacatttgggagcaccttaagatgctgaaacactgrcaaatgcttaatatatttcatttgaaagaattatgatctaaatcttaaagaaacagtgagtaaagtgcagtttctgctgcttggttactgtagttcattcggggaatttcatcttggtcgtgttgaatgcagtggttagatcctgtgaagttgtttaattaaaggtgttctagtagtcaaagccatgtctaaaaccccgt

SEQ ID NO: 686 - DNA, 401 bp, Homo sapiens
gaatatttcttatctatatgcatatatatatatatttcattataattgttgcttctgcagaaaattgggatagaaatctcagatgagctgtagttacacggagatctacagcaatgcaatgtttagctagcatgcattttgtcatccaaggctagtaggtgaaatatttcctttacctgtcttgatgcacggtggagaaakgagacccgcttcgttttccctctaatctagagagttaacctcctccaggtagggttgaaaatatgaacagagctgcttttgcaagactgtgttgcctctaaatgtgatttaactcgcatattcagaatcttagcaaaaataaataaataaatagtaagatggggtaaggcaaatacatagatattttggagatcttatcc

SEQ ID NO: 687 - DNA, 401 bp, Homo sapiens
caggtagggttgaaaatatgaacagagctgcttttgcaagactgtgttgcctctaaatgtgatttaactcgcatattcagaatcttagcaaaaataaataaataaatagtaagatggggtaaggcaaatacatagatattttggagatcttatcccttattcaaggactgtagattattacagctttgttgtcatattatytctaggcagtaaatcatagtaaagtagtaaattcatagggaatgaattaatctcctttttgttttgttttctctgaaaaagagggtgtgattacagcatatattgattgggtactgattatgggacattttcattgtatttgttgttgttgcagtagactaaatgtcgagcccgtgaatctcttgtgttggcattgtcag

SEQ ID NO: 688 - DNA, 401 bp, Homo sapiens
tatatctttatattttttttgctctcttctcaaccatgtttagtgttttgtttatattcaaaggattttattttcacacttacaattctttacttgtctgtcattcaaatctttgttaccaaaacagtttgctctttttcatcattcactaagcattcctttcacagctaagctaaagtgtctatatggaaacatacatayacacacacacacacacacacacacacacatgcacacacactttttccaggccacagacaggaagatatgtgtaaatgtatacatgttttcagtagcatatatacacaagggtctccaataagatttttctagaaacaaaggctgatactacttcatttcatattattgtaaagtgctaattctaagtaaaagtagactaa

SEQ ID NO: 689 - DNA, 401 bp, Homo sapiens
ttttctctgccatctcccccagttacacccagggcaagtctatcttcttcaaagacattcagtcagcccacagctttttatcttttcaaacctttaatggcaccattagctacggaaccttgatttccttaatttttcccccactgtcactgcaaccatcacatgtggctctcagagcttctagttccctggaaacaggakttctatctgccatcaccaggtataaggtgccaccacttgaagggatctgccctatcaaaaatgaggaaatatattgatcaaaatggctggagaaagtgaccagccaaaacacagcttcacagtcttgcctgttttaagtagattctatttccattttgccggtgacagcactaagcaaataagcaatgttgccaatccga

SEQ ID NO: 690 - DNA, 401 bp, Homo sapiens
aaaacatcttccgtaataagcagctagaaagtaccacaatgtaaattcaactgcagaagacatgacaccacagggaaatttcgtttcactgcagcagtgtctaaaaactgaagatggggaaagtgtagagtgtgttattaaaatgattttttcaaaaggttttaagagtctaaataaattgcataattagtcagtttcctwcctcctagtcttcctacctttagtctttatttttagctctcctgagtttgtagttgttctccttccatggtttgattctctccttagctttcagattctatacatttcacttctctttataaataatttttaaaaattcttcatgtgaacctgttcaagaacctgttgcattgaggactgaagatatggctctagattcc

SEQ ID NO: 691 - DNA, 401 bp, Homo sapiens
cactttctgcatattgccaagggctcgctacgtatgtgtgttctggttggcagacattttgggtaactactattctcaatttgtacctactttatttcaatacatgtttcaagatgagtgttaaagggtacattgctttaggaaacttgtctttttctggcatttgaacttgcctaaattagaaaaaaaaattctggttcyagtcctttttttctaaaaaaatattccaaatcattagatgaaactgttaaagataacgtttggaaagtttgtctcctcttyggtgattaaaaagtgctttccatttttggcccatggctcttttcctggggcatagcatttgattataaagcttttctgatgaaagtatcacaggayagcaaacatgagaatgggagaaa

SEQ ID NO: 692 - DNA, 401 bp, Homo sapiens
tgtacctactttatttcaatacatgtttcaagatgagtgttaaagggtacattgctttaggaaacttgtctttttctggcatttgaacttgcctaaattagaaaaaaaaattctggttcyagtcctttttttctaaaaaaatattccaaatcattagatgaaactgttaaagataacgtttggaaagtttgtctcctcttyggtgattaaaaagtgctttccatttttggcccatggctcttttcctggggcatagcatttgattataaagcttttctgatgaaagtatcacaggayagcaaacatgagaatgggagaaataattttgcatgcaattttttgtcatctggctgcactgtatgggaaatacattttccctgtcaaaatgtcaagttgttttg

SEQ ID NO: 693 - DNA, 401 bp, Homo sapiens
attagaaaaaaaaattctggttcyagtcctttttttctaaaaaaatattccaaatcattagatgaaactgttaaagataacgtttggaaagtttgtctcctcttyggtgattaaaaagtgctttccatttttggcccatggctcttttcctggggcatagcatttgattataaagcttttctgatgaaagtatcacaggayagcaaacatgagaatgggagaaataattttgcatgcaattttttgtcatctggctgcactgtatgggaaatacattttccctgtcaaaatgtcaagttgttttgacttcacaacaaaagaggaaggaagttcttaaatgtagaacaataactcagctcactgctgatttctatttgttctatccttacatcacagtatag

SEQ ID NO: 694 - DNA, 401 bp, Homo sapiens
gcataattttgtttattgtttgagaaagtagtattttgggtaaaaattctgaaacaggcagtgagtatgtctgagtatttctggcaagggctatttcttcctttctccttttactctggagttttcttgaactgagctgtttggacaaatgacacatatttcaagaattccaactgtgggagtgtttcactcacaggattktgctttcttctaagagccaggtctggtgaacactctcaggagctttgtaacatgttccaagctatgcagaagtgcttagttcattcactagtcaaagactaacacatttacagcaataaaatgcattataagcattctttcttcatgaatctattcatcccattaaaaaagcaggaattccaattaagtgaggtaaaata

SEQ ID NO: 695 - DNA, 401 bp, Homo sapiens
ttccaattaagtgaggtaaaatatgctaagtagtacagtataagatttttaaaaattacaccatgtttttcatggattattttaagaaaaaaactattttaagaaaaaactgtcctatttttggaaggtctagtcccaaactgcacaggaaagttagaggtaaactgttaaagtctttgagaactggcatttttcaagccrcagtgaatgaaatcaagcattyctctgtttctcctttcctttcggaatttcttttcctgaggcttgagaaggcaatactggtcttacttttcacatgagtyaagtttatactagctgagcaccctgaatcattaacgtctttctccccaggggagaccaagctcaaatccatcatcagaatacatacttagaccctctcc

SEQ ID NO: 696 - DNA, 401 bp, Homo sapiens
atgctaagtagtacagtataagatttttaaaaattacaccatgtttttcatggattattttaagaaaaaaactattttaagaaaaaactgtcctatttttggaaggtctagtcccaaactgcacaggaaagttagaggtaaactgttaaagtctttgagaactggcatttttcaagccrcagtgaatgaaatcaagcattyctctgtttctcctttcctttcggaatttcttttcctgaggcttgagaaggcaatactggtcttacttttcacatgagtyaagtttatactagctgagcaccctgaatcattaacgtctttctccccaggggagaccaagctcaaatccatcatcagaatacatacttagaccctctcccttctttctggccccctgcttc

SEQ ID NO: 697 - DNA, 401 bp, Homo sapiens
agaaaaaactgtcctatttttggaaggtctagtcccaaactgcacaggaaagttagaggtaaactgttaaagtctttgagaactggcatttttcaagccrcagtgaatgaaatcaagcattyctctgtttctcctttcctttcggaatttcttttcctgaggcttgagaaggcaatactggtcttacttttcacatgagtyaagtttatactagctgagcaccctgaatcattaacgtctttctccccaggggagaccaagctcaaatccatcatcagaatacatacttagaccctctcccttctttctggccccctgcttcttaggaatgtgctctaaccaccacagcattcctgatcaccacctccagatgacaaaaagaaaaaatgagtggcagtgaa

SEQ ID NO: 698 - DNA, 401 bp, Homo sapiens
ctaaccaccacagcattcctgatcaccacctccagatgacaaaaagaaaaaatgagtggcagtgaaccagaagagcttaggccatctattttatcctaaaatctgttcagaaatacgaggtttgtatcaattagtaagcacactgggaatacaggtatacaagttgttagcaatatttggttatataatgtctatagatayttattttgctttctctcagatattaagaattatgtctttcctttaacctccatcatttgtttttctactttggtggaagctttttgtttgtwtctttactgcaacagtgaatttatccttggatttctccattatgattggcagtatttatacaataatttcttggtattagttaattgataccttatatttactatttt

SEQ ID NO: 699 - DNA, 401 bp, Homo sapiens
atcctaaaatctgttcagaaatacgaggtttgtatcaattagtaagcacactgggaatacaggtatacaagttgttagcaatatttggttatataatgtctatagatayttattttgctttctctcagatattaagaattatgtctttcctttaacctccatcatttgtttttctactttggtggaagctttttgtttgtwtctttactgcaacagtgaatttatccttggatttctccattatgattggcagtatttatacaataatttcttggtattagttaattgataccttatatttactattttcccccaaagctgagtaaagaatagaatgaaatggcctatacttatcagtgtaaatggatattagaattgctgctcttattccaaaaaatakc

SEQ ID NO: 700 - DNA, 401 bp, Homo sapiens
twtctttactgcaacagtgaatttatccttggatttctccattatgattggcagtatttatacaataatttcttggtattagttaattgataccttatatttactattttcccccaaagctgagtaaagaatagaatgaaatggcctatacttatcagtgtaaatggatattagaattgctgctcttattccaaaaaatakcactyaaagttcacaaatgaaagttaataactgaattttagtaacaacaacttcaacttaaaaaattccatgtaattaatagctcatgagtcccactgagataggttgaacttcataacttctaaagccttttatgtttctactacttttcagttctaatgttcaatagtagcgtgagtatctggttagtttcagtataa

SEQ ID NO: 701 - DNA, 401 bp, Homo sapiens
ttactgcaacagtgaatttatccttggatttctccattatgattggcagtatttatacaataatttcttggtattagttaattgataccttatatttactattttcccccaaagctgagtaaagaatagaatgaaatggcctatacttatcagtgtaaatggatattagaattgctgctcttattccaaaaaatakcactyaaagttcacaaatgaaagttaataactgaattttagtaacaacaacttcaacttaaaaaattccatgtaattaatagctcatgagtcccactgagataggttgaacttcataacttctaaagccttttatgtttctactacttttcagttctaatgttcaatagtagcgtgagtatctggttagtttcagtataaaaaag

SEQ ID NO: 702 - DNA, 401 bp, Homo sapiens
ggtggatggcactgctcattagaaatagctgtcctgccccagaacaatcttcaagacaaaggttgcaagactatctttgaccttcctgtccctaaacactccccaaccccaagccaaacacgcgcctaaaagttttcacaccttgccctttactaacagcaatcatatttaggaggaatatattattgttagtcaggaaaytctacctggcttcaggaggtagcttagtgggtatttgctaagtctgatacctttcctttcaacatttagctgagattacctatactaagagcacgaactacaactgtggaaaacagaagaaaggagaatgttctccaaatcaaagtgtgctaaggtcagcttggggcagccaacaattcctggaaggtgacagagataaa

SEQ ID NO: 703 - DNA, 401 bp, Homo sapiens
tggaagaaaaaacaagagtataaatgaagtgtcaaagatgttaagaaacaggatcttttaaaaaattatttttaattattatgggtacataataagtgtatatatacatggggtacatgtgaaattttgatacatacaatgtataataatcttatcggggcaattggggtgtccatcacctcaggcatttatcatgtcttrtattagaaacagtccaattctcctcttttagctatttgaaaatatacaataaattattgttgagtatcatcactctgttgtgctatcaaatactagatcttattctttctatctaactatgcttttgcacccattaaccatccccaccttctccccatgctggctatccttcctagcctctggaaaccatcattctatta

SEQ ID NO: 704 - DNA, 401 bp, Homo sapiens
agaacattattaacttgaaagaaatgcatgtattttgttaattgatagaaacaagatcaaagggcatattatattattattccgctttgtaaggaaaaataggttttgcatatttatataaaaagggaaattgaatgtgatatactctggggtattaataataattgtgaattaaattcctttctttagtttatattgctrtctcaaatcttctgatttttctaccttgaatgtaaattttttgtttgtaatatggcactttaaattaaagttgtttttcagctgggcacagtggctcacacctgtaatcctagcactttgggagaccaaggtgggtggattacctgaggtcaggagttcaagaccagcctgaccaatatggtaaactccttctctactaa

SEQ ID NO: 705 - DNA, 401 bp, Homo sapiens
  misc_feature (1)...(401): n = A,T,C or G
ggagtgcagtggcatgatcacagctcactgcagcctcaacctcctgngctcaagtaatcctcccacctcagctttccaagtaactaggactacagatgcacaccaccatgcctggttaatttttgtaatttttgtagagatgaggttttgccatgttgcccaagttggtctcaaactcctgacctcaagtgatcctcccayctcagcctcccaaagtgctgggattacaggtgtgagccactgcactaggccttaaaatttatttttcaaaaacttgatgattcaaatcattgaagatgctcttatgccaaagaaaaggtagttctaggaagttcatggaatcttacaaacacctttacagctcaacagaattgcaaagatgggtagtgttttgttttgtt

SEQ ID NO: 706 - DNA, 401 bp, Homo sapiens
actcatatcaggtgaattagcaaacattctcatttcagacgatttttgctgtccctggtcatgaaatttccttaactgggttctatcttttactttttatcccaggcttttagcaagggtcataggaaaatggccatttccacatatctggtatatcccatttgaagatattgcctaacaaacattactcaggatcccttrcataaaaacctccatgataaatttcttctgtacttttttccccaaaaagctggattctcctgtaaaactgttatctattctctttatatattataattatggaattcattatcatttctactcttatctacatgactaggtcaccaacagctaattatatagctaattcatggtagttaattttatttacttctcttaag

SEQ ID NO: 707 - DNA, 401 bp, Homo sapiens
acagctaattatatagctaattcatggtagttaattttatttacttctcttaagtcatgacttacaaaattgcatttctatgtatgccatcttattacctccatttatttaagttgcatactacttcacatttcctttgaagtgtatattattattagtagtagtagtattttggagacagggtctcactctgttgcccakgctggagtgcagtggtgcaattatggctcactgcagcctcaaccttccaggctcaagctgttcacctacttcagcctccccagtagctgggactacaggtgtgtgccaccatgcttggctaattttttaaaaatttcctatttcttgtagagatagagtcttactatattgcctaggctggtcttgaactcctggacaca

SEQ ID NO: 708 - DNA, 401 bp, Homo sapiens
gattctcctgcctcagcctcctgagtagctgggactacaggcatgagccaacatgcccagctaattttcatatttttagtagagatagggtttcaccatgttggccaggttggcctcgatctcttgatctcgtgatccacccccccatcagcctcccaaagtgctgggattacaggtgtgagccattgcatccagcctcaraagaatagtataaaccttatgtgttcatataagcagtagaacctatccctaatagttggattttattgtgtaagtgtttcattaaggaatgtctgaaacatgtccagatttttatttcagtggcttagttttgccacagaacttcagttttataaatgtgtgtactggcttaactgtgaaagtattaaaattattgtatt

SEQ ID NO: 709 - DNA, 401 bp, Homo sapiens
tgttcccagagtcattactgaccaactgtgtgctttgatattatatttgctttctgatactaattatattaattctcgctcatagaaatcttccctccttcataccccacctctgtttgattcttaatctcatacataagaggtttttattcaatgtctcatttttctttccaggacaagtatgttgtaagaattaattartagtcttagaaccattcaagcagtaggttctaattgagtatttttctccccggttagcacagcaccctgtcagagccctcaaagtcagacaaagaaggatgaaacatgttttggtccttaataaagaactgctgattgactgtttgaaaaacaaatgccgcacacctgtaatcccagtgctttgggaggccaaggcagga

SEQ ID NO: 710 - DNA, 401 bp, Homo sapiens
ttctaggagtttggctcaattcagggctaacaaaaaaatctgtttagggccacttggggattagtgattctcaaaaggtagtccttgaatcacttactgaatacctatagttgaagaacagataactgcattttaacaagattcaaaggcaaattaatgtttgatgaccgttgacatcaagtctcagaatcagaactgttyaacttccaagcaaatgaaattactaaactcacttctctgagtgaggctgagagcaagaagttaagtataatgttttttgagctaaaatacagagtctactatcagaatcctgtttcccaccataaggattaagatttttttgtttttgtgtgtgtatgtgtgtgtgtgtgtgtgaatgtgtgtgtgtgtgtttgtttttt

SEQ ID NO: 711 - DNA, 401 bp, Homo sapiens
ctctactccctgctgcatacaacttccttctttctatctataaatactatatctgctctagaaacgtgaaaaataacataaatattgaacagagtgtgaaggaatttaaactttattgatgagtagtagtattacccttctggactgatgcagatgagagcaccataaagacaaagtgagttcttttggtccttaagccaygaattggagtctggatagtagggatggaaatgggttattagatcatcagttcactttcctctccaagcagcaattaaatttgttttctttgtctcagcttactcgttgctcaaaaaaaagaaacatttcagctcctcttcatggggaataagaccaaacatagaacacttttctcttaacatgtgtggtgcttgagagga

SEQ ID NO: 712 - DNA, 401 bp, Homo sapiens
tacagctgactccaagatgagtgtgatgctatcacggtgcaggataacagagatgtaccgcgaacccaacactcaagatgggaatgataaaacttcaataacaaaaacaaaaaaacaaaacaagccacactatcctttcagccttcagggatcgcctccttaaactgttttctaaaatctttctgcactttatatcaggtrcaggagaagtagactacatacattatttgttgtctatctttgaaaggatttcattccctctactgcacttaatcattcccttatctgaatattaactcagtgtaaagcttcccaaattttccaagttcttgaaagagagcaaaacatattgcaaagctctatatgtttcctgctagatatatttcgtgaaagacttcatt

SEQ ID NO: 713 - DNA, 401 bp, Homo sapiens
tgctctgaaactttgtgcatttgagggtttttttttccccgtgatttggtggactgcaagggcacacaaaactagcttatttttcctagtcaggcagttttgaatagaaggtgattgtgttttccagagataagtatgtaagtcttttctgctaccggaggaggattctattttagtagtctattaagtagacaataagcrctgagttatgagttgataagtggatctgcttaccacctagaaacatcaattgaaaccacagcttatggtttcttactgcctctttttggtttctcactgagtctttctggttattgttatcatttcgtttttgacttgggcttggactgttcagcttggctgtgttaatttttcagaatcaatgacttttatagttactt

SEQ ID NO: 714 - DNA, 401 bp, Homo sapiens
ttttcctcctgcattttatttaagcaattcactaactatttataagaccatctttgaaagcctgagatacatatctaggcaaatatccatggaaaaaataaacactctgcaaatttgcaaacaaatacagcaattgccaaagtagggttatcttttgcaatcagtactgtggtttcagtttgaaaaaataaagctttcttrtcagttttgctccaagggctatctgattcggtgtgtagtcggtgaggaaataaatacaggtataataatctgtgcttgctcaaaaattaaaaaatcctttaggagggggccaggcgtggtggctcatgcctgtaatcccagcaatttgggaagcagaggcagacagtttacctgaggtcaggagttcttgagaccagcct

SEQ ID NO: 715 - DNA, 401 bp, Homo sapiens
ggaggaaagatgagctttaaaaaaaaaaaagtgatactggagcaattggatatccaaaggcaaaaaaaaaaagtgcctaaattcatttctcacatcttatacagaaattaactcaaaattgattacagacttaaacataaaatgttaagcaataaaactttaggaaacaaacaggagaaaatgatgaggacctaaagctakgtgaagaacttctagacttgatactaaaagtatgattttcattttaaatgaattttaaaatgaatttcaatgaattttaaaattcattttaatcaactgggacctcatcaaaattaaaacttttgttctgtaagagaccctgtgtaaagaattaaaagaaamactacagagcaggagaaaacatttgccaaccacatatt

SEQ ID NO: 716 - DNA, 401 bp, Homo sapiens
ggaaacaaacaggagaaaatgatgaggacctaaagctakgtgaagaacttctagacttgatactaaaagtatgattttcattttaaatgaattttaaaatgaatttcaatgaattttaaaattcattttaatcaactgggacctcatcaaaattaaaacttttgttctgtaagagaccctgtgtaaagaattaaaagaaamactacagagcaggagaaaacatttgccaaccacatattcaagaaagattttgtacctagagagtataaagaactctcaaaactccacagtaaaatccaaacgatccaattaggaaaatgggcaagaaacataaacagaaattttaccaaagatgatatacagatggaaaataagcacatgaaaagatgttcaatatcatt

SEQ ID NO: 717 - DNA, 401 bp, Homo sapiens
ccaaccacatattcaagaaagattttgtacctagagagtataaagaactctcaaaactccacagtaaaatccaaacgatccaattaggaaaatgggcaagaaacataaacagaaattttaccaaagatgatatacagatggaaaataagcacatgaaaagatgttcaatatcattagccattaggaatatgcaaattaaamcaatgagatagcactatctacctatcaggatggctaaagtaaaaaagagtaataataccaattgctggagaggatgtggagaaactggatcactcatacattgttgatggaaatgtaaaatggtacactctgtaaacaatttgcttgcttcttataaaactaaacatgtatttaccatatgattcagcagttgtgctctt

SEQ ID NO: 718 - DNA, 401 bp, Homo sapiens
caagggaattgtgctaactaaaaataagccaatcacaaaagatttcatgtgatgtgattttatttatataatattcttgaaatgacaaaaatatagaaatggagaacagattagtagtttccaggggtcagagagtagaggagggagggaggtgtgtgtgtccataaaaacgttgcgccagggatcctggtgaggaagctrttctgtatcctcattgctggtgttcacgtgaatctacatatgtgataacatttgatggaaccaaatacacmcacaaacacacacatacacatatgagtgcatataagaccagagaaacttattttggtggattccgtaaatgtcaaatctttggttatgatattgaagtgtagtttggcaagatgttactattggggaaa

SEQ ID NO: 719 - DNA, 401 bp, Homo sapiens
tattcttgaaatgacaaaaatatagaaatggagaacagattagtagtttccaggggtcagagagtagaggagggagggaggtgtgtgtgtccataaaaacgttgcgccagggatcctggtgaggaagctrttctgtatcctcattgctggtgttcacgtgaatctacatatgtgataacatttgatggaaccaaatacacmcacaaacacacacatacacatatgagtgcatataagaccagagaaacttattttggtggattccgtaaatgtcaaatctttggttatgatattgaagtgtagtttggcaagatgttactattggggaaaatagtaacattgtactattgtcctgtgaattattgattcacaggaaattgtaaaaaaaaatgctttgtcct

SEQ ID NO: 720 - DNA, 401 bp, Homo sapiens
aatctttggttatgatattgaagtgtagtttggcaagatgttactattggggaaaatagtaacattgtactattgtcctgtgaattattgattcacaggaaattgtaaaaaaaaatgctttgtcctatacatttttttagaatttcctgtcaatccataattatttcaagataaaaaaagttttgtaaaggaagaattttkgagactctttcagattttttattttgagatttaatcwattatatgagaaaaataagctttaactgaccactctttccttcctatccaaagcttagtcaatgagaaaatgttgcaagagaaggagaatggggggtacctgagactccaggagagtacataccctttttaaaaaagcaatacaagccagcagaaaaaggaar

SEQ ID NO: 721 - DNA, 401 bp, Homo sapiens
atgttactattggggaaaatagtaacattgtactattgtcctgtgaattattgattcacaggaaattgtaaaaaaaaatgctttgtcctatacatttttttagaatttcctgtcaatccataattatttcaagataaaaaaagttttgtaaaggaagaattttkgagactctttcagattttttattttgagatttaatcwattatatgagaaaaataagctttaactgaccactctttccttcctatccaaagcttagtcaatgagaaaatgttgcaagagaaggagaatggggggtacctgagactccaggagagtacataccctttttaaaaaagcaatacaagccagcagaaaaaggaargatgggactctggagcgattatgtgaatctgtggttc

SEQ ID NO: 722 - DNA, 401 bp, Homo sapiens
kgagactctttcagattttttattttgagatttaatcwattatatgagaaaaataagctttaactgaccactctttccttcctatccaaagcttagtcaatgagaaaatgttgcaagagaaggagaatggggggtacctgagactccaggagagtacataccctttttaaaaaagcaatacaagccagcagaaaaaggaargatgggactctggagcgattatgtgaatctgtggttctcaaagttcagcatgcatcagattcccagagggcttgtttaaacaaaaatttctgccctgcaaccacagagtttctgattcactaggtctgggggtggtgggtgtggttcaagaatctgcatttctagaaagttcccatgtgatgttgactccagtgctgatg

SEQ ID NO: 723 - DNA, 401 bp, Homo sapiens
tggagcgattatgtgaatctgtggttctcaaagttcagcatgcatcagattcccagagggcttgtttaaacaaaaatttctgccctgcaaccacagagtttctgattcactaggtctgggggtggtgggtgtggttcaagaatctgcatttctagaaagttcccatgtgatgttgactccagtgctgatgctgctggtcaraccacactctggaaactactgccatagaacatctgagagtcacaatttgaaactgtctcaagaaatttctaagtaaaatgcaatgcaataaattacttaagaattctctatatttacaactctttatttgwatagtttccttccccctcagtatgttggctggtaagaatgttctttttgattattcatctgtgtgggct

SEQ ID NO: 724 - DNA, 401 bp, Homo sapiens
tggttcaagaatctgcatttctagaaagttcccatgtgatgttgactccagtgctgatgctgctggtcaraccacactctggaaactactgccatagaacatctgagagtcacaatttgaaactgtctcaagaaatttctaagtaaaatgcaatgcaataaattacttaagaattctctatatttacaactctttatttgwatagtttccttccccctcagtatgttggctggtaagaatgttctttttgattattcatctgtgtgggctcaagagtgtgtcactgagttaatttacaaagcctcggattgcatatccatcacatttgtagaaagtattatcccagaaaaatccatcaacacaacacataagctccaaaatgtactgcacaattggcgtgc

SEQ ID NO: 725 - DNA, 401 bp, Homo sapiens
tggtaagaatgttctttttgattattcatctgtgtgggctcaagagtgtgtcactgagttaatttacaaagcctcggattgcatatccatcacatttgtagaaagtattatcccagaaaaatccatcaacacaacacataagctccaaaatgtactgcacaattggcgtgcaatagagtagtcaaagaaccaatgaaatgyaaaaagttatctatatggagatctcaaaatgaattaacaaattaaatcctttgacattgtatgagatcccattagggttcattgttacagttttctttaatgtttctaaaatagaaatgttgtcctgggcagagcagtgtaatgtacttgctttggcatcaaatgccacattttttttttttttgagacggcgtcttgct

SEQ ID NO: 726 - DNA, 401 bp, Homo sapiens
ttctttaatgtttctaaaatagaaatgttgtcctgggcagagcagtgtaatgtacttgctttggcatcaaatgccacattttttttttttttgagacggcgtcttgctctgtcacctaggctggagtgagtgtgcagtggtgcaatcgtagctcactgtagcctcgaactcctgggcttaagcaatcctcccacctcagcmtcctgagtagctgggactacaggtcccagstgcccagctatttttaaaattttttgtagagacaagtcttgctatgttgcccwggctgatcttaaactcctagcctcaagaaatccttcagacttgtcctcctagagtgttgggattacaggtgtgagcctccacaccaggcattgtttctattttaactttgctactta

SEQ ID NO: 727 - DNA, 401 bp, Homo sapiens
tcctgggcagagcagtgtaatgtacttgctttggcatcaaatgccacattttttttttttttgagacggcgtcttgctctgtcacctaggctggagtgagtgtgcagtggtgcaatcgtagctcactgtagcctcgaactcctgggcttaagcaatcctcccacctcagcmtcctgagtagctgggactacaggtcccagstgcccagctatttttaaaattttttgtagagacaagtcttgctatgttgcccwggctgatcttaaactcctagcctcaagaaatccttcagacttgtcctcctagagtgttgggattacaggtgtgagcctccacaccaggcattgtttctattttaactttgctacttacgagaagtcttaatttgaccaacaactaat

SEQ ID NO: 728 - DNA, 401 bp, Homo sapiens
tttttttttgagacggcgtcttgctctgtcacctaggctggagtgagtgtgcagtggtgcaatcgtagctcactgtagcctcgaactcctgggcttaagcaatcctcccacctcagcmtcctgagtagctgggactacaggtcccagstgcccagctatttttaaaattttttgtagagacaagtcttgctatgttgcccwggctgatcttaaactcctagcctcaagaaatccttcagacttgtcctcctagagtgttgggattacaggtgtgagcctccacaccaggcattgtttctattttaactttgctacttacgagaagtcttaatttgaccaacaactaatgtaagctctagtttccccatatgtaaaaagaagataatgcctaaattgcaggg

SEQ ID NO: 729 - DNA, 401 bp, Homo sapiens
gggtttattgggagaattaataagaacacgcctaggccaggcacaatggctcatgcctgtaatcccagcactttgggaggccaaggcagctggatcatgaggtcaggagttcgagaccaccctgaccaacgtggtgaaaccctgtctctactaaaaatacaaaaattaggggagtgtggtggtgggcgcctataatcccasctactcaggaggcttaggcaggagaatcacttgaacccgggaggcggaggttgcagtgagccgagatcgtgcaattgcactccagacttggcaacagagcaagactccatctcaaaaagaaaaaagaaaaagaaaaataagaacacgtctaaaataattagtgcagtgtctgacacttaagttctcaaatagtggcggtg

SEQ ID NO: 730 - DNA, 401 bp, Homo sapiens
aaaacttaaagagtttaatatattgctcaaggttatccagtgtattggtttgctagggctctgtaacaaagtaccacaaaccaggtggctcaaacaacagaaatgcattgtttcacagttctggcgtcaaaaagtccaaaatcacagtgttggcagctttggttccttctgagggctgcaagggaaagattgttctgggtmcttctccttggcttgtagatgtctgtcttctccctgtgtctctccatgtcattttttcctctatgcatgtctgtctctgtgtccaaatttttccattttaaaaggacattagtcattgctgggcacaatggctcacacctgcaatcccagcactttgggaggctgagagaggcagatcacttgaggccaggagttcgaga

SEQ ID NO: 731 - DNA, 401 bp, Homo sapiens
cttctccttggcttgtagatgtctgtcttctccctgtgtctctccatgtcattttttcctctatgcatgtctgtctctgtgtccaaatttttccattttaaaaggacattagtcattgctgggcacaatggctcacacctgcaatcccagcactttgggaggctgagagaggcagatcacttgaggccaggagttcgagaygagcctggccaacatggtgaaacgtgtctctgcaaaataatacaaaaattagctaggtatggtggtgcatgcctatagttccagctatttctactcaggaggctgaggcatgagaattgcttgaacccaggaggcagacgttgcagtgagctgagatcatgccactgcactccaacctgggtgacagagtaagactctgt

SEQ ID NO: 732 - DNA, 401 bp, Homo sapiens
aaaaattagctaggtatggtggtgcatgcctatagttccagctatttctactcaggaggctgaggcatgagaattgcttgaacccaggaggcagacgttgcagtgagctgagatcatgccactgcactccaacctgggtgacagagtaagactctgtctcaaaagaaaaaaaaaaaaaaagggcattagtcattggattasggcccaccctatggaactcattttaacttgatgagctctgtaaagaccctatctctaaattatatcacattctgaggtgctgggaggtaacactccaacttatctttattgaggggggcagaattcaaatccatagcacatagtagtaagatgtcatgctgaggtatgaaccagacttcatacgcaatgctgtggactaa

SEQ ID NO: 733 - DNA, 401 bp, Homo sapiens
ttgtgttggaattagcacccttataagaagaaaaaaaggccaaagcctcctctctctctgccacctgaaaatgcaacagggaatggccatccacatgccaagaaatgggcccttatcatacaccaagtcttcctgcacattgatcctcgatttctcaggttttggaactgcaggaaatcgacgttcattgtttaagccacrcagtctatggtattttgttatagctgcctgagctgactaagacaggcaatatatgacatggccgtttgctccaggacttttaggaaatgtggatcccattggtagtgctcagcaatcaaatttatttgatcctcatgttcagcagacatgttgtttttttcttcatgtattgccaactcttttatatgatacataaaaca

SEQ ID NO: 734 - DNA, 401 bp, Homo sapiens
acctaaaccagctgttgagaagtagtggcaaaggccagttgtttcaaagtcatagagatcaggctccttaaaagagaagtatttaaaatgaaaaacattaatatcaaagattatgttaaagaccagagtttaaccctgagcataccagtccagcaaattccaaaaggtgggtggggaaaatctttcagttacacagtaccrttcgttgagtttcttgaagctaggatgtcaatgttcttgatgatgttcagtctcggttagctttcctctaagagaatgaaggacctgagcttttcaccagaatttgttaggggctcagacagtggtttgtgcagggaaaagtctggcctgcgtgtaatctgctgcagtggtgagttcttcaaagtttgaatcaagtagtt

SEQ ID NO: 735 - DNA, 401 bp, Homo sapiens
aatctgggcaatcagatgttatttttcagtgacatcaagttagggaaagagagaaaaattggaaacattaatttgtagggttgtagccagatattgaagcaaactggaaggcttcacagtttggtacaaattaacaatttgggcaagataacaggatccagttcaatttttaggaaggtgtccaaactgctttttccacaraggaggggaagtcatttaaatcattccagacaagtcagaatttgcatatgtatcagttacctgcaatttatgaaactgtataatatggctaagagataattatgtctacaatctgataaacaggaaggagctgcttgctatagttttccactgaaacaaaacatttctctctatagtcacccctcttttgatcaaaaata

SEQ ID NO: 736 - DNA, 401 bp, Homo sapiens
gaaactgtataatatggctaagagataattatgtctacaatctgataaacaggaaggagctgcttgctatagttttccactgaaacaaaacatttctctctatagtcacccctcttttgatcaaaaataatctcaaagaaagattattcttgatcacaaaataaagctagtaccatcagatttggcctgattatttacatkgttgtcttaaagatgataattcactacatagggtttcttatatttgctttgctgaaagttttcataaggaatctcaaattgaatttttaaaaaccacttgaggctaggaagctatatcaagaactcaccaacagatttacctacagtatctataaatttcrgtaaatgcctctcttttagaggtcccaaaaatatctcaa

SEQ ID NO: 737 - DNA, 401 bp, Homo sapiens
taaagctagtaccatcagatttggcctgattatttacatkgttgtcttaaagatgataattcactacatagggtttcttatatttgctttgctgaaagttttcataaggaatctcaaattgaatttttaaaaaccacttgaggctaggaagctatatcaagaactcaccaacagatttacctacagtatctataaatttcrgtaaatgcctctcttttagaggtcccaaaaatatctcaagttttctgagcctgcgaggaagtatcctttacctgtaaatttgggcacctcattagccagraatcaggctgrttttcccaagagggctttaaatgagcatacctaatgtttccaatatttcatgcaaacaaggaagagttttattgaacctatgcaaataa

SEQ ID NO: 738 - DNA, 401 bp, Homo sapiens
ttcataaggaatctcaaattgaatttttaaaaaccacttgaggctaggaagctatatcaagaactcaccaacagatttacctacagtatctataaatttcrgtaaatgcctctcttttagaggtcccaaaaatatctcaagttttctgagcctgcgaggaagtatcctttacctgtaaatttgggcacctcattagccagraatcaggctgrttttcccaagagggctttaaatgagcatacctaatgtttccaatatttcatgcaaacaaggaagagttttattgaacctatgcaaataactataattttgaaatataatgagaatactcagtaagaatttctgatttctctaacagtcaggcaggaagaaaaagataccaatgacaaatgtttcattta

SEQ ID NO: 739 - DNA, 401 bp, Homo sapiens
tctcaaattgaatttttaaaaaccacttgaggctaggaagctatatcaagaactcaccaacagatttacctacagtatctataaatttcrgtaaatgcctctcttttagaggtcccaaaaatatctcaagttttctgagcctgcgaggaagtatcctttacctgtaaatttgggcacctcattagccagraatcaggctgrttttcccaagagggctttaaatgagcatacctaatgtttccaatatttcatgcaaacaaggaagagttttattgaacctatgcaaataactataattttgaaatataatgagaatactcagtaagaatttctgatttctctaacagtcaggcaggaagaaaaagataccaatgacaaatgtttcatttatatttgcaaag

SEQ ID NO: 740 - DNA, 401 bp, Homo sapiens
ttaaatgagcatacctaatgtttccaatatttcatgcaaacaaggaagagttttattgaacctatgcaaataactataattttgaaatataatgagaatactcagtaagaatttctgatttctctaacagtcaggcaggaagaaaaagataccaatgacaaatgtttcatttatatttgcaaagcatagacttctgaattrttatgagtttcagttagtttaagagaaaatagaaakaagtttcctatgtccaaaaaatcaaccattaaaatatcagcaatattccaaacaaaagctacagtcattcctcatcagttccttcagtcctgtgtaattcttgctctgcttcctcttggcttaacagtttcatgcatacatctgcctctccaaacagggctctg

SEQ ID NO: 741 - DNA, 401 bp, Homo sapiens
caaacaaggaagagttttattgaacctatgcaaataactataattttgaaatataatgagaatactcagtaagaatttctgatttctctaacagtcaggcaggaagaaaaagataccaatgacaaatgtttcatttatatttgcaaagcatagacttctgaattrttatgagtttcagttagtttaagagaaaatagaaakaagtttcctatgtccaaaaaatcaaccattaaaatatcagcaatattccaaacaaaagctacagtcattcctcatcagttccttcagtcctgtgtaattcttgctctgcttcctcttggcttaacagtttcatgcatacatctgcctctccaaacagggctctggaaatcctgactcagtctgctggtatggtctcaagg

SEQ ID NO: 742 - DNA, 401 bp, Homo sapiens
gtgtaattcttgctctgcttcctcttggcttaacagtttcatgcatacatctgcctctccaaacagggctctggaaatcctgactcagtctgctggtatggtctcaaggttgtgtaagtgacggcatcagaagcttctgccccaaatgaaaagtacctggcatagagctttgccatggggctctgagataatcctttgttragacaaagcactacagctagatttgtaagagctttcagggaagcaccacaaagcaaaattctatttgtaaatgacaaaagccttaaaaattactttgaaaaatcattttcaaacgtgaaagatgtaaggagtgtttatcacaagaatctccatttgaaaaatactggcttataggcacagaaaaacaaagatagtatgtt

SEQ ID NO: 743 - DNA, 401 bp, Homo sapiens
aaattgggaagagtaaatttcaaatgttctcacacaacaaaatgactagtatttgaagtgatgtcgttaactggctcaatttaattattccacatggtaggcataaatcatattatcactttgtaccccatatacttacaatatcataaattgtcaatttacagtttttttttaaaaaaaaggaaagcactggcttagaakaagctaatttgaaattaacgaataaaagttgttaccaagttaacattttaaaaataactgaaacttatgactcatgtggtgctctctaataacagggcaaagtgacatcgggactcaaagaaaaacacgttatggacataaaagcctttgatgactctctaggaattttccatacagcatacaatttctgaaatatttat

SEQ ID NO: 744 - DNA, 401 bp, Homo sapiens
aaacttatgactcatgtggtgctctctaataacagggcaaagtgacatcgggactcaaagaaaaacacgttatggacataaaagcctttgatgactctctaggaattttccatacagcatacaatttctgaaatatttatactgataacattctgcccatacagatttgtcctagggaaggttaagcatctcttctgagtwggcaatgactcccgtgcaatttgtaaatagtaacatatcaaataaacctaattcttttcagcaactttcttttcataaggtgaaataacaaatcctttgtgattttcaaaggccctctgggagatatcaaagacagtttcagatgcaatagatatcacttaggaatcagttttgggagggaaaatatcaaaagttgtcag

SEQ ID NO: 745 - DNA, 401 bp, Homo sapiens
actaggatacggtcgtgagttactgataaacaatactttgctaccttaactaaggtgacagcaaaaagagtgaaaaagtaagcacaggcagtaacatgattgtaaagaatcttagctttttcaaaagggagaagactttattaaataagcaaggacgtgataaactcaatacacaatataggaagttattttaagacatgkaatctttgccttctaggcagattactcagaaggtaaagaaaaaatattattaagagtagactaagaagtyaagaaaatgttatgtttttaaacagaggcaaaattaaattctactttgcatcattatggcatttgatattaaagatctttttgaaatcttataaatgaattcatcaagccttagctagcactgaccacag

SEQ ID NO: 746 - DNA, 401 bp, Homo sapiens
tgaaaaagtaagcacaggcagtaacatgattgtaaagaatcttagctttttcaaaagggagaagactttattaaataagcaaggacgtgataaactcaatacacaatataggaagttattttaagacatgkaatctttgccttctaggcagattactcagaaggtaaagaaaaaatattattaagagtagactaagaagtyaagaaaatgttatgtttttaaacagaggcaaaattaaattctactttgcatcattatggcatttgatattaaagatctttttgaaatcttataaatgaattcatcaagccttagctagcactgaccacagcaaagtttgtttcccacaagcgttttacaactttctacgtctattcagcttttgtcctacacattaacaa

SEQ ID NO: 747 - DNA, 401 bp, Homo sapiens
aggaagaacattcacaagtagaatagaagcatacttgtgttatatttaacactaaaaactcagagaaaacagctatttttactaaatcaacctcattaattgattatcaaaataataattattgttaaatattgtttgccaaacatttacctagattttgtgaacttgaattattgtctctgagttatgttcctacaagakacagctttttcccctacagtaaaagtgtttaaggctcaatttcctcaacttctgggaatttgggaaatatttggtttatataaatggttatttatttctaagccaattagaatagagctcctttaagagattctataacctaatttagcgacaccatcctgaggtagggaaatattttatttttatttttttcagagatg

SEQ ID NO: 748 - DNA, 401 bp, Homo sapiens
ggtttatataaatggttatttatttctaagccaattagaatagagctcctttaagagattctataacctaatttagcgacaccatcctgaggtagggaaatattttatttttatttttttcagagatgggctagattagaactcctgccttcagcctcctgagtagctaaggttgcaacttccatagtagctgaaattgtrggtgcatgccaccrtatctggccaacagggaaatattacatactctaacaatgagtggtgacwtcctttctgaattacagacatgtagacattaaagcagagatagcaagaatttagtttccattctaacatttaagccatgggtcaagagtggacacagaatcacaaaacttactgtttcatatcaaagagctgttctg

SEQ ID NO: 749 - DNA, 401 bp, Homo sapiens
gttatttatttctaagccaattagaatagagctcctttaagagattctataacctaatttagcgacaccatcctgaggtagggaaatattttatttttatttttttcagagatgggctagattagaactcctgccttcagcctcctgagtagctaaggttgcaacttccatagtagctgaaattgtrggtgcatgccaccrtatctggccaacagggaaatattacatactctaacaatgagtggtgacwtcctttctgaattacagacatgtagacattaaagcagagatagcaagaatttagtttccattctaacatttaagccatgggtcaagagtggacacagaatcacaaaacttactgtttcatatcaaagagctgttctgttctcatgattctt

SEQ ID NO: 750 - DNA, 401 bp, Homo sapiens
taacctaatttagcgacaccatcctgaggtagggaaatattttatttttatttttttcagagatgggctagattagaactcctgccttcagcctcctgagtagctaaggttgcaacttccatagtagctgaaattgtrggtgcatgccaccrtatctggccaacagggaaatattacatactctaacaatgagtggtgacwtcctttctgaattacagacatgtagacattaaagcagagatagcaagaatttagtttccattctaacatttaagccatgggtcaagagtggacacagaatcacaaaacttactgtttcatatcaaagagctgttctgttctcatgattcttaagtgatttgagctcaaaacagacaaacagaaaagcgtagcaaaccaaa

SEQ ID NO: 751 - DNA, 401 bp, Homo sapiens
agggcccaaataagccttattacctgtgttgagtaaacaaagatcccagtgcaggagatccatatcatggcaccaaactatcaaatacaggatgcactaggtcattaaagagaagattttattcaaagcattgcaaaatggagaacattgatttatggtgaatatcttgaagaaaaggaagggggtctggggttctatagrggcaagaaaaaacgggagtcatccagaagtcttataaaagtcatgaagaagggtggagatgggtcttatctcagaatatgggaaggcagtttgggcctttgcattagttgtttgccagacactaaagggtagagaggtttcttaatcattactcttttccrgaagcacagggctcaggtaagattgaatatttttcatgc

SEQ ID NO: 752 - DNA, 401 bp, Homo sapiens
atatcttgaagaaaaggaagggggtctggggttctatagrggcaagaaaaaacgggagtcatccagaagtcttataaaagtcatgaagaagggtggagatgggtcttatctcagaatatgggaaggcagtttgggcctttgcattagttgtttgccagacactaaagggtagagaggtttcttaatcattactcttttccrgaagcacagggctcaggtaagattgaatatttttcatgcctttcatcctctctgtctgatctctttcaaacygtcttttttgttgaggctatatgaaatgtttactgttttaccttccaatcaactccataaaaacggttgatataaagcatctagccaagttccactacattttagtcattcattatggaacatcatcc

SEQ ID NO: 753 - DNA, 401 bp, Homo sapiens
tataaaagtcatgaagaagggtggagatgggtcttatctcagaatatgggaaggcagtttgggcctttgcattagttgtttgccagacactaaagggtagagaggtttcttaatcattactcttttccrgaagcacagggctcaggtaagattgaatatttttcatgcctttcatcctctctgtctgatctctttcaaacygtcttttttgttgaggctatatgaaatgtttactgttttaccttccaatcaactccataaaaacggttgatataaagcatctagccaagttccactacattttagtcattcattatggaacatcatcccaaggaaggctttattctctctgtctaagcaagcaatgaagggagatcttttggaaatggcctagtatttga

SEQ ID NO: 754 - DNA, 401 bp, Homo sapiens
aaaacttcacagtgtatgatgacactgataccttctagtctattcccagctgttctatttcatttttttatagcttatagtgactcattaaaatggatttccacgaatgcaatgcaacacacagtttgaagtccactggaaaatcttttaaaactgttattataaaatgaatttagtaaccttttcaaaattttactagtrtagtttctgtggtttttaagaatacaaatattttgccttctggtcttttttttcacacaagtatatggcagattcctataaatattttaatagatcagcagtttccaatgccatgtttcggtgatgatattttaccagagatagtctgtaatgaaaaattgagacaaatgatgacaatgtaatttgcagacatgtatact

SEQ ID NO: 755 - DNA, 401 bp, Homo sapiens
ttaatagatcagcagtttccaatgccatgtttcggtgatgatattttaccagagatagtctgtaatgaaaaattgagacaaatgatgacaatgtaatttgcagacatgtatacttatttataataaatttgtagacatgtatatttagttagttattcaacaaatattcagtgccttttatatcttaagaatggttcatgwtaattggaggcaaacaagaaaggcaaagttactgcttagttgaaatttacattctagtataaaaattgccatatttattattattattattattatacttaaagttctgggatacatgtgcagaatgtgcaggtttgttacataggcatacgcttgccatggtggtttgttgcacccatcaacccatcatctacattagg

SEQ ID NO: 756 - DNA, 401 bp, Homo sapiens
tgggatacatgtgcagaatgtgcaggtttgttacataggcatacgcttgccatggtggtttgttgcacccatcaacccatcatctacattaggtatttctcctaatgctatccctccccgctccccccaccccacaacaggccctggtgtgtgatgttcccctccctgtgtccatgtgttctcactgttcaactcccactwatgagtaagaatatgcagtgtttgtttttctgttcctgtgttagtttgctgagaataatagctttcagcttcatccatgtccctgcaaaggacacaaactcaaccttttttatggttgcrtagtattttgtggtgtatatgtggcacattttctttatccattctatcattgatgggcatttgggttggatccaagtctt

SEQ ID NO: 757 - DNA, 401 bp, Homo sapiens
ctccccccaccccacaacaggccctggtgtgtgatgttcccctccctgtgtccatgtgttctcactgttcaactcccactwatgagtaagaatatgcagtgtttgtttttctgttcctgtgttagtttgctgagaataatagctttcagcttcatccatgtccctgcaaaggacacaaactcaaccttttttatggttgcrtagtattttgtggtgtatatgtggcacattttctttatccattctatcattgatgggcatttgggttggatccaagtctttgctattgtgaatagtgctacaataaacatatgtgtgcatgtgtctttataatagagtgacttataatcctttgggtgtatacccagtaatgggattgctgggtcaaatggtatttctgg

SEQ ID NO: 758 - DNA, 401 bp, Homo sapiens
gcccatgcctatgtcctgaatgatactgcgtcagttttcttccagagttttatggttttaggtcttatgtgtaagtctttaatccatcttgagttaatttttgtataaggtgtaaggaagaggtccagtttcagttttttgcatatggctagccagttttcccaacaccatttattaaatagggaatcttttccccattgyttgtttttgtcaggtttgtaaaaaatcagatagttgtagatgtgtggcattatttctgaggcctctgttctgttccattggtctatatatctgttttggtaccagtaccatgctgtttgggttactgtagccttgtagtatagtttgaagtcaggtagcttgttgcctccagctttgttctttttgcctaggattgtctt

SEQ ID NO: 759 - DNA, 401 bp, Homo sapiens
ttgtagatgtgtggcattatttctgaggcctctgttctgttccattggtctatatatctgttttggtaccagtaccatgctgtttgggttactgtagccttgtagtatagtttgaagtcaggtagcttgttgcctccagctttgttctttttgcctaggattgtcttggctatacaggctctcttttggttccatatgaamtttaaagtagttttatctaattctgtgaagaaagtcaatrgtagcttgatggggatagcattgaatctataaattactttgggcagtatggccattttcatgatattgattcttcctatccatgagcatggaatgtttttccatttgtttgtatcctctcttatttccttgagcagtggtttgtagttctccttgaagac

SEQ ID NO: 760 - DNA, 401 bp, Homo sapiens
tccattggtctatatatctgttttggtaccagtaccatgctgtttgggttactgtagccttgtagtatagtttgaagtcaggtagcttgttgcctccagctttgttctttttgcctaggattgtcttggctatacaggctctcttttggttccatatgaamtttaaagtagttttatctaattctgtgaagaaagtcaatrgtagcttgatggggatagcattgaatctataaattactttgggcagtatggccattttcatgatattgattcttcctatccatgagcatggaatgtttttccatttgtttgtatcctctcttatttccttgagcagtggtttgtagttctccttgaagacgtccttcacatcccttgtaagttgtattcctagggatttt

SEQ ID NO: 761 - DNA, 401 bp, Homo sapiens
tccatttgtttgtatcctctcttatttccttgagcagtggtttgtagttctccttgaagacgtccttcacatcccttgtaagttgtattcctagggattttattctctttgtagccattgtgaatgggagttcactcatgatttggctctctgtttttctattattgatgtataggaatgcttgtggtttttaaacattgwttttgtattctgaaactttgctgaaattgcttatcaktttaaggagattttgggctgagaagatggggttttctaaatgtacaatcatgtcatctacaaacagagacaatttgacttcctcttttccaatttgaatatactttatttctttctcttgcctgattgccctggccagaacttccaatacaatgttgaatagg

SEQ ID NO: 762 - DNA, 401 bp, Homo sapiens
tggtttgtagttctccttgaagacgtccttcacatcccttgtaagttgtattcctagggattttattctctttgtagccattgtgaatgggagttcactcatgatttggctctctgtttttctattattgatgtataggaatgcttgtggtttttaaacattgwttttgtattctgaaactttgctgaaattgcttatcaktttaaggagattttgggctgagaagatggggttttctaaatgtacaatcatgtcatctacaaacagagacaatttgacttcctcttttccaatttgaatatactttatttctttctcttgcctgattgccctggccagaacttccaatacaatgttgaataggagtggtgacagagggcatccttgtcttgtgccagttt

SEQ ID NO: 763 - DNA, 401 bp, Homo sapiens
tgattgccctggccagaacttccaatacaatgttgaataggagtggtgacagagggcatccttgtcttgtgccagttttcaaatgcttcctgtttttgcctattcagtatgatattgcctggggggttgccataaatgactcttattatttttggatacattccatcaataggtagtttattgagagcttttagcatgaartagcattgaattttatggaaggccttttctgcatctattgagacaatcatgttgtttttgtcattggttctgcttatgtgatggattacgtttattggtttgtgtatgttgaaccagccttgcatcccagggatgaggctgacttgatcgtggtggataagctttttgatgtgctgctggattcagtttgccagtatttt

SEQ ID NO: 764 - DNA, 401 bp, Homo sapiens
tgttttgcctctgccaggttttgctatcaggatgatgctggcatcataaaatgagttagggagaagtacctctttttctgtcatttggaatggtttcagaaggaatggtaccagctcctctttgtacctctggtagaaatcggctgtgaatctgtctggtcttgggcttttcgattggtaggctattaattactgcctcartttcagaacttgttattggtctattcagggatttsacttcttcctggtttagtcttgggagggtgtatgtgtctaggagtttatcaatttcttctagattttctagtttatttgcgtagaggtgtttatagtattctctgatggtagtttgtatttctgtgggatcagtggtgatatccccttcatcatttttttattgt

SEQ ID NO: 765 - DNA, 401 bp, Homo sapiens
tgctggcatcataaaatgagttagggagaagtacctctttttctgtcatttggaatggtttcagaaggaatggtaccagctcctctttgtacctctggtagaaatcggctgtgaatctgtctggtcttgggcttttcgattggtaggctattaattactgcctcartttcagaacttgttattggtctattcagggatttsacttcttcctggtttagtcttgggagggtgtatgtgtctaggagtttatcaatttcttctagattttctagtttatttgcgtagaggtgtttatagtattctctgatggtagtttgtatttctgtgggatcagtggtgatatccccttcatcatttttttattgtgtctatttgattcttctctcttttcttctttatta

SEQ ID NO: 766 - DNA, 401 bp, Homo sapiens
tgttctcattggtttcaaagaacttatttatttctgccttcatttcattatttacccagtagtcattcaggagcaggttgttcaggttccatgtagttgtgtggctttgagtgagtttcttcatcctgagttctaatttgattgcactgtggtcaaagagactgttatgatttccattcctttgtgtttgctgaggagtgyttcacttccaattatgtggtcagttttagaataagtgagatgtggtgctgagaagaatgtawattctgttgatttggggtgtagagttctgtagatgtccattaagtctgcttagtccagagctgagttcaatggaatatccttgttaattttctgtcttgttgatctgyctaatgttgacagtcaggtattaaagtccc

SEQ ID NO: 767 - DNA, 401 bp, Homo sapiens
tcattcaggagcaggttgttcaggttccatgtagttgtgtggctttgagtgagtttcttcatcctgagttctaatttgattgcactgtggtcaaagagactgttatgatttccattcctttgtgtttgctgaggagtgyttcacttccaattatgtggtcagttttagaataagtgagatgtggtgctgagaagaatgtawattctgttgatttggggtgtagagttctgtagatgtccattaagtctgcttagtccagagctgagttcaatggaatatccttgttaattttctgtcttgttgatctgyctaatgttgacagtcaggtattaaagtccccactattattgtgtgggagtctaagtctctttgtaggtctctaagaacttgctttatgaatc

SEQ ID NO: 768 - DNA, 401 bp, Homo sapiens
tttccattcctttgtgtttgctgaggagtgyttcacttccaattatgtggtcagttttagaataagtgagatgtggtgctgagaagaatgtawattctgttgatttggggtgtagagttctgtagatgtccattaagtctgcttagtccagagctgagttcaatggaatatccttgttaattttctgtcttgttgatctgyctaatgttgacagtcaggtattaaagtccccactattattgtgtgggagtctaagtctctttgtaggtctctaagaacttgctttatgaatctgggtgctcctcatattgggaatctggttgctccttgtatttggatgygtatatatttaggatagttaactcttcttgttgcattgatctctttaccattacataatg

SEQ ID NO: 769 - DNA, 401 bp, Homo sapiens
gcttagtccagagctgagttcaatggaatatccttgttaattttctgtcttgttgatctgyctaatgttgacagtcaggtattaaagtccccactattattgtgtgggagtctaagtctctttgtaggtctctaagaacttgctttatgaatctgggtgctcctcatattgggaatctggttgctccttgtatttggatgygtatatatttaggatagttaactcttcttgttgcattgatctctttaccattacataatgcccttctttgtctttatctttattgatttgaagtctgttttatcagagactaggattgcaacctctgctttttcttgctttccatatcttggtaaatattcctccatccctttattttgagcctgtgtgtgtctttgcac

SEQ ID NO: 770 - DNA, 401 bp, Homo sapiens
tgtctcctgaatacagcacaccaatgggtcttgactctttctccaatctgccagtctgtgtctttaattggggcatttagcccatttacatttaaggttaatattgttatatgtgaatttgatcctgtcattatgatgctagctggttattttgcctgttagttgatgcagtttcttcatagtgtcaatggtccttacaawttggtatgtttttgtggtggctgttaccaktttttcctttccatatttagtgcttccttcaggagctcttgtaaggcagacctggtggtggcaaaacctctcagcatttgtttgtctgtaaaggattctatttctccttcacttatgaagcttagtttggctggatatgtaattctgggttgaaaattcttttctttaag

SEQ ID NO: 771 - DNA, 401 bp, Homo sapiens
ttgactctttctccaatctgccagtctgtgtctttaattggggcatttagcccatttacatttaaggttaatattgttatatgtgaatttgatcctgtcattatgatgctagctggttattttgcctgttagttgatgcagtttcttcatagtgtcaatggtccttacaawttggtatgtttttgtggtggctgttaccaktttttcctttccatatttagtgcttccttcaggagctcttgtaaggcagacctggtggtggcaaaacctctcagcatttgtttgtctgtaaaggattctatttctccttcacttatgaagcttagtttggctggatatgtaattctgggttgaaaattcttttctttaagagtgttgaatattggcccccaatctcttct

SEQ ID NO: 772 - DNA, 401 bp, Homo sapiens
gtcgatacttgtgtatgcttcgcaaagttctcatgcagtgtttttcagctccatcaggtctttatgttcttctgtaaagtggttattctagtaagcaattcctctaaccttttttcaagtttcttaccttccttgcattgggaggagcttgttattacccaccttctgaagcctaattctgtcaattcatcaaactcattmtccatccagttttgttcccttgctggtgaggagtttgtgatcctttggagragaagaggtgttctggtttttggaattttcaggctttttgcactgatttatcctcatctgtgtggatttatctacctttggtctttgatactggtgacctttggatggggtttttgtgtggatgtcctttttgttgatattgatgctat

SEQ ID NO: 773 - DNA, 401 bp, Homo sapiens
catcaggtctttatgttcttctgtaaagtggttattctagtaagcaattcctctaaccttttttcaagtttcttaccttccttgcattgggaggagcttgttattacccaccttctgaagcctaattctgtcaattcatcaaactcattmtccatccagttttgttcccttgctggtgaggagtttgtgatcctttggagragaagaggtgttctggtttttggaattttcaggctttttgcactgatttatcctcatctgtgtggatttatctacctttggtctttgatactggtgacctttggatggggtttttgtgtggatgtcctttttgttgatattgatgctattcctttctgtttgttagttttccttctaacaggcctctctactgcaggtct

SEQ ID NO: 774 - DNA, 401 bp, Homo sapiens
tgactacagcatctttgctgagctgtggtaggctctgccaagtacgaacttcttggtgctttatttacactgtgaggggaaaactgcctactgaagcctcagtaatggtggacacccctcccctaaccaagctagagtgtcccaggtggacttcagactgctatgctggcagcgagaatttcaagccagtggatcttagcytgctgggctccatgtgggtgggatccgctgagctagatcacttggctccctgactccagccccctttccaggggagtgaacagttctgtctcactggcattccaggtgccactggtatgaaaaaaaactcctgcagctagcttggtgtctgcccatatggtaaccagttttgtgcttcaagccatatttcttttattgga

SEQ ID NO: 775 - DNA, 401 bp, Homo sapiens
atatagtgttagtagctgacgatttttttttcttcaaaaataaatttggaaacttgtcagtccataatttttttaagtattattttactatctcatgaaatctgaaaggctagaatacactagataactcttgatttccactcctaccctgccatgaagtgataattcacatctggctataacttcataaaaggggcaggrcgacccacttcctaaaagaccactattgacttgaagacctgtgtctcttgtctcacttctaaaagtgatttaaaactcaataactcactctgaaatccactgtataagaaatagtaatgtttagggtcatttaaaagaaagattagtttaataaattttggcaccctgtttaacatataaaaccatgaccatgtgttaag

SEQ ID NO: 776 - DNA, 401 bp, Homo sapiens
atgtgattcaaaagactgatttaatagctatagtccaagaagtgttgaaaactcttgcccagtttatggtttccaatataggacacatatcaacagaataagaaactcaagaattaaactgatgactgtgtcgacctctggaggaactcttttttaagacacaaagccaaattttcaccttcatttatgcacactcatctyctgaaggcttmcttatgcatttacgtgtgaaggaaggagaggatttgactcagtctctttgtctgtcatctttcttcctctctcattctgaaatagcttttcacagttgaggaaaaaataaagatttgaccttcccacagtgaatgataacaatgataacagctgatctttatatagtgtttattatatgacagagatca

SEQ ID NO: 777 - DNA, 401 bp, Homo sapiens
aagactgatttaatagctatagtccaagaagtgttgaaaactcttgcccagtttatggtttccaatataggacacatatcaacagaataagaaactcaagaattaaactgatgactgtgtcgacctctggaggaactcttttttaagacacaaagccaaattttcaccttcatttatgcacactcatctyctgaaggcttmcttatgcatttacgtgtgaaggaaggagaggatttgactcagtctctttgtctgtcatctttcttcctctctcattctgaaatagcttttcacagttgaggaaaaaataaagatttgaccttcccacagtgaatgataacaatgataacagctgatctttatatagtgtttattatatgacagagatcatttcatgcact

SEQ ID NO: 778 - DNA, 401 bp, Homo sapiens
tactagcctttttaagatagacattgctgacacatggacagggattgaattagtacaaatattaaatatcattaagccttcttttttgagttctgtctgcacatcaacttcacctgaagaatgtttgtaaaatacacatgcttgttccccacccaaaatctattgaatcagaatctctagggagtgaggaccaacagttgygcttttaacacctccactccccccttgtattggacggtaaaggccagaaaagattaccttaggcattctcatttcagaagctaaaacagacattcaattttctataccctaatttgggacttatatctgagtgttaatatatgcatgtaatactttgtgatgaatgttaaatgtgttttaatagtgttcccttgcagaat

SEQ ID NO: 779 - DNA, 401 bp, Homo sapiens
ttctatctaaggaagatgagttccttagttctgggaaaacaccattgaggaaggatgcttcagaagaggaagggatgtcagccagggcagataaaattagcaagaaatattaagattaagtgctatctaagaggtacaaaaaataatagtgtttcacctcaatagaatcttattgttaaaaatacagtgtatctacagttytgaagattatcaaaacacaatattctagccccaaaacaggaaaagaataatgattcttaagaaaaaattctttctgggctgggtagggtggctcatgcctgtcatcccagcactttggaaggctgaggtgggtggatcatgaggtcaggagatcgaaatcatcctggctaacccagtaaaaccacgtctctactaaaaat

SEQ ID NO: 780 - DNA, 401 bp, Homo sapiens
cagtcattaccatgagcagtcaataattccctgaatccctgttggacagaattacatcaggtacatgtgttgtgatgttttctgttttgagttctgtttgttttttatttattggtaattcagataatctcagtttcaggaatttgttttcttctctcctaaaatggagctgatgttcatctcttccttatgttatacctrtatttatgcaccaatttcatagaaaaccatcgtgcattttcccatggaattttgggtgacagtttaagatcagcgtttactataatgggcagacttaaaatggtccccgtgatccctgactcctgaagttcactcccttgtatgcttccccctctttgaatgtcagcggacctttaacctagagaatacagcagagttgg

SEQ ID NO: 781 - DNA, 401 bp, Homo sapiens
aacaattaatagtcataattgatagttttatgcatgaaaattaagtattgctcctgcaaaactgaggagttaatgtctttacgtgctttttcacaaacattccttataatggaacaccaaatgcctacaatttgaacacatggctggtggaaaaaaagaagaaaaagaaaatcaatcctaagccagaaatctgaaaaaagrcagtgactttgggtcattttgtaatcatctttggtgcttcagtgactaaaaaatacatgcagagtgcaagagcaccttgctgaatcctacaccctgccctccttgtgcagttatgttacatgcaactccaaagcctccacagctgttgtctctactctccattcaaaacaatgcacgtgcaactttcccttgtggctggc

SEQ ID NO: 782 - DNA, 401 bp, Homo sapiens
ttcctgtggagcctccttcctctccaaggaatttgtcgcatgggactgcataattcagttgtccattcagtcaacagtgatttactaacaacctactttgtgttaggcactgttccagggtctgcgcattcagcagtgagcaaaataacacaaaatgcttgctctcatgaacctggagacagacggtaagaatatacagcrataggcaacatggtaggtggggatgagtgctctgaattaaaataaggcaggacacagagatggagagtgacctggacaggacagggttggcagctcagaagtgcattatctacagtggtcagggaagcctctccagtgaaaggacattaagacggagctgaaggaagggagagagtggatgaaagagcaaaatccctgga

SEQ ID NO: 783 - DNA, 401 bp, Homo sapiens
ggatgaaagagcaaaatccctggaactgggacatgcttggcaggttgagtgtccacaagagccccaattaactacaggagggtgagcaaggagagagtagagggagttgaggttagagaagtaaccgtacgtcaaattatggaggactgagtttctcaaactccagtgtctgcgcaaatcccccagggatcttgtgaaacsacaggccttgatttagaagatctgcggcaggcccagggtctgcattcctaccatgcccccagatgatgcccctgcctctaccgttccccagaccatgctttgagtagcagagatgaaggccttcttgcccacagtacaaattctgctatttctttcctgttaatttgaattggtatgcaacaactgtacatatttatggg

SEQ ID NO: 784 - DNA, 401 bp, Homo sapiens
tctgtcccccaggctggagtgcaatgtcacaatcataattcactgcagcctccactcccagggcacaaatgaccttctgcctgagcctactgagtagctaggactacaggtatgcaccaccacaccctgccaatgttatattttttgtagaggaaggttctccctgtgttgatgaggctgctttggatgcttttaaatagwggggaaataggatcagactcatttttagggagcccctctggctgctctgtgaaaayagggcaagggaggaaataggagacctcctgggagataactggagtagtctgggtgagatacttcagtgccagcatctaaggtacttgcaggtgggacagccacaacgaatgccacttcaagtgaatgtgaggatcagctctgct

SEQ ID NO: 785 - DNA, 401 bp, Homo sapiens
cccagggcacaaatgaccttctgcctgagcctactgagtagctaggactacaggtatgcaccaccacaccctgccaatgttatattttttgtagaggaaggttctccctgtgttgatgaggctgctttggatgcttttaaatagwggggaaataggatcagactcatttttagggagcccctctggctgctctgtgaaaayagggcaagggaggaaataggagacctcctgggagataactggagtagtctgggtgagatacttcagtgccagcatctaaggtacttgcaggtgggacagccacaacgaatgccacttcaagtgaatgtgaggatcagctctgctgcccaygtggaaacataagtaaggttgttacctgtggccttgcagaagcctgcaag

SEQ ID NO: 786 - DNA, 401 bp, Homo sapiens
aataggatcagactcatttttagggagcccctctggctgctctgtgaaaayagggcaagggaggaaataggagacctcctgggagataactggagtagtctgggtgagatacttcagtgccagcatctaaggtacttgcaggtgggacagccacaacgaatgccacttcaagtgaatgtgaggatcagctctgctgcccaygtggaaacataagtaaggttgttacctgtggccttgcagaagcctgcaagtcaaaggccttttgatggttggtgaaaatcacatctgatatgcgtgattccaggaagctcatctgcctcattcctgaatttaatttctatccatgaygcacatattactattgcattaaacgtgaagtcattgcctcctgccattgtaat

SEQ ID NO: 787 - DNA, 401 bp, Homo sapiens
cagccacaacgaatgccacttcaagtgaatgtgaggatcagctctgctgcccaygtggaaacataagtaaggttgttacctgtggccttgcagaagcctgcaagtcaaaggccttttgatggttggtgaaaatcacatctgatatgcgtgattccaggaagctcatctgcctcattcctgaatttaatttctatccatgaygcacatattactattgcattaaacgtgaagtcattgcctcctgccattgtaatgtatgcatgctattgcagaggaaatgtttttatctacctcccaaataagtaagcataacttgagctcgcattacaaaatgacacaataaactaaaaaggaattcatttaatatttttaaacatgattttggtgtccttatatttagg

SEQ ID NO: 788 - DNA, 401 bp, Homo sapiens
ttacgttcagatggcacatgtgcaggtttgttacatgggtaaattgcatgttactggggtttggtgtacaaattattttgttacccaggtggtgagcatagcatagtacccaataggtagtttttccctttttttttttttttttttttttttttgagacagaatctcgctctgtcgctcaggctggggtgcagtggtgcratctcagctcactgcaacctccgctcctgagttcaagcgattccccctgcctcagcctcctgagtagttgggatgacaggcacctgccaccaggcccccataatttttgtatttttagtagagatggggtttcaccatgttggccaggctggtctcgaactcctgacctcaggtgatctgcctgcctcagcctcccaaag

SEQ ID NO: 789 - DNA, 401 bp, Homo sapiens
attgttcccttctttgtccccatgtgtacttagtgtttagctcccacttattaagtgagaacatgcagtatttggttctctgttcttgcattaattcgtttagacatggcccctccagctgcatctatgttgagcaattaaaaaaggttaagatgagctaagtgaggtggtatgcatctgtagtaccagctactcaggacrctgaggcaggaggatcacttgagcccaggagttcaaagccagcctgggcaacatagtgagaccccccccatctcttttaaaaaatatttcagatgataaattttatgctgtatgtattttaccataatacaaaattggttgaagaggagtacatataaacacaacaacgaagtgtttaactcatcaatttcagatacaca

SEQ ID NO: 790 - DNA, 401 bp, Homo sapiens
aagtgtttaactcatcaatttcagatacacagtaaaagaatgtatatgagaattggtcaaggacattctgaggctttaagcttcaagtcaagaaaaacaactgcctttctgaaaacttacaccgctcacagagtctggtgggctatgaatttgatggtacaacttctaacttgacagtgtggagatcaagggtataggaawggtaaaaagctttgaaaagtttgagagtggagtttgcacagctggacacagggcaccacaaacacaggtggtgcatttgtgcctttggtggacaaagtatcacccacaatgcacaggcgcttccctggctggacaataggtctctctctccatcccctctctctctgtttcaagagaagacattttacgtaggaccttcc

SEQ ID NO: 791 - DNA, 401 bp, Homo sapiens
tcttagaattgagtccttagaagaaataccaagctaaagggcatgtgaatttctaagtttcctggcacttaattccaaattgttattccaatttctagtgtgccatactacatctttattagcattcaggattatcttcttggttaatatagtaaaatatcattttgttgtttgaattttcattgctttgataattgatgrtatttaaagatgtttaggctctttttttctttttcatttgctcagcttttctgaaaacctttaggagacaagtttctcccaaattttttctactgagatttatgcattactgatatgacttctaacatataagctagttaacatcaagaggattagtctatcacaccacttgtcacctggggcaaggtagtatccagttc

SEQ ID NO: 792 - DNA, 401 bp, Homo sapiens
cattactgatatgacttctaacatataagctagttaacatcaagaggattagtctatcacaccacttgtcacctggggcaaggtagtatccagttcattagggtaaaggtcaagtaagtgttttgtttgtttaaaggggaacacgggtaggagttatcccaaagttagaacgcaatgaaacccaactatatagtaaaatayatttggggctcaactctgttagccatcaaaggtagtacaaaacatcagaagatgaagagggttttgaaagaaagaagggccatgtcagattaagaggtagaggaacatcaagataatttttcttctattagagtttctcttttagggtttctattagagtttctctaatagggggtagagaaacagcaagataatttttt

SEQ ID NO: 793 - DNA, 401 bp, Homo sapiens
tagggtttctattagagtttctctaatagggggtagagaaacagcaagataattttttttctattagaatttctccattagagtttctcacctgcaaggtgttgactttccagttacctggcatttcattctactttttggaatggcctgagctgaaattaatcaggctctgttgatgatgcatccaccagggtttcccaktggatgcttagaaaaaattccatcacagaatatctgtgtcttgtcttcttgggggctaggagatcccccaaatttttctcttctgttcttgtttgataaaggatgtgtggaggacctggtgcttragagtttcagtttgacataaaggtactagttctggagagtctcttgggccactttatgttaacaaagactctctt

SEQ ID NO: 794 - DNA, 401 bp, Homo sapiens
tcattctactttttggaatggcctgagctgaaattaatcaggctctgttgatgatgcatccaccagggtttcccaktggatgcttagaaaaaattccatcacagaatatctgtgtcttgtcttcttgggggctaggagatcccccaaatttttctcttctgttcttgtttgataaaggatgtgtggaggacctggtgcttragagtttcagtttgacataaaggtactagttctggagagtctcttgggccactttatgttaacaaagactctcttgatcagcctttagttaagcttctctgagctctctccttgactaggcttcaaccttgggcttctgtgtcagtccttgtggagtctggttttagcaagaatcttgcaaagtcagtttagagagaata

SEQ ID NO: 795 - DNA, 401 bp, Homo sapiens
tccactgaccccacactctgctctttgactctaaatcttcatttgtccttgttgtcttcaatgtcgaggccaatctctttcccctaccataatatctctattgaaatagtcctgaacaaagtcttccttgccattttcacacgtgccagaataatgcttgcctccctgcctgcctgccttccttccttccttccttccttmcttmcttccttccttccttccttccttmtttcyttccacagaatctcgctctgtcacccaggctagagtgcagcggtataatcaaggctcacagcagcctsggccttccaggctcawgtgatcctcccagctcagcctcccgagtagctgggaccacaggcacatatcagcacgcttggctaattcttttttgccttttg

SEQ ID NO: 796 - DNA, 401 bp, Homo sapiens
ctgaccccacactctgctctttgactctaaatcttcatttgtccttgttgtcttcaatgtcgaggccaatctctttcccctaccataatatctctattgaaatagtcctgaacaaagtcttccttgccattttcacacgtgccagaataatgcttgcctccctgcctgcctgccttccttccttccttccttccttmcttmcttccttccttccttccttccttmtttcyttccacagaatctcgctctgtcacccaggctagagtgcagcggtataatcaaggctcacagcagcctsggccttccaggctcawgtgatcctcccagctcagcctcccgagtagctgggaccacaggcacatatcagcacgcttggctaattcttttttgccttttgtttg

SEQ ID NO: 797 - DNA, 401 bp, Homo sapiens
ctctaaatcttcatttgtccttgttgtcttcaatgtcgaggccaatctctttcccctaccataatatctctattgaaatagtcctgaacaaagtcttccttgccattttcacacgtgccagaataatgcttgcctccctgcctgcctgccttccttccttccttccttccttmcttmcttccttccttccttccttccttmtttcyttccacagaatctcgctctgtcacccaggctagagtgcagcggtataatcaaggctcacagcagcctsggccttccaggctcawgtgatcctcccagctcagcctcccgagtagctgggaccacaggcacatatcagcacgcttggctaattcttttttgccttttgtttgtttgtttgtttgtagagacaaagt

SEQ ID NO: 798 - DNA, 401 bp, Homo sapiens
aatcttcatttgtccttgttgtcttcaatgtcgaggccaatctctttcccctaccataatatctctattgaaatagtcctgaacaaagtcttccttgccattttcacacgtgccagaataatgcttgcctccctgcctgcctgccttccttccttccttccttccttmcttmcttccttccttccttccttccttmtttcyttccacagaatctcgctctgtcacccaggctagagtgcagcggtataatcaaggctcacagcagcctsggccttccaggctcawgtgatcctcccagctcagcctcccgagtagctgggaccacaggcacatatcagcacgcttggctaattcttttttgccttttgtttgtttgtttgtttgtagagacaaagtttcac

SEQ ID NO: 799 - DNA, 401 bp, Homo sapiens
tgaaatagtcctgaacaaagtcttccttgccattttcacacgtgccagaataatgcttgcctccctgcctgcctgccttccttccttccttccttccttmcttmcttccttccttccttccttccttmtttcyttccacagaatctcgctctgtcacccaggctagagtgcagcggtataatcaaggctcacagcagcctsggccttccaggctcawgtgatcctcccagctcagcctcccgagtagctgggaccacaggcacatatcagcacgcttggctaattcttttttgccttttgtttgtttgtttgtttgtagagacaaagtttcactatattgcccaggctggtctcaaactgctgggctcaagcaatcctcttgcttcaaggtcccaaagtac

SEQ ID NO: 800 - DNA, 401 bp, Homo sapiens
aaagtcttccttgccattttcacacgtgccagaataatgcttgcctccctgcctgcctgccttccttccttccttccttccttmcttmcttccttccttccttccttccttmtttcyttccacagaatctcgctctgtcacccaggctagagtgcagcggtataatcaaggctcacagcagcctsggccttccaggctcawgtgatcctcccagctcagcctcccgagtagctgggaccacaggcacatatcagcacgcttggctaattcttttttgccttttgtttgtttgtttgtttgtagagacaaagtttcactatattgcccaggctggtctcaaactgctgggctcaagcaatcctcttgcttcaaggtcccaaagtactgggattacaggcatg

SEQ ID NO: 801 - DNA, 401 bp, Homo sapiens
gtagctctttgaaaagactgcttgatctttcctcactctccgtgtacctaaatcttgttcaggctctgtccagaaatcaataggaaacataaaaccttgaagcattataaaatcaggcattctaaactggaaagggcctttgattatttagcccaaatgcatcacctgttttacagacgagcaacctgaagttcggagagstggaacttcctccaggtcatctgctgcactggtgatagaggcaggactaaacactctcggtgcagtgttccttctctgagtcatgttgactactatatgctcattcacagtcacaaactaaaaatctcagacaagtcaaaagcatacaattacaggaccagaagactcctcagtgattatctgggagtccaggcatccaa

SEQ ID NO: 802 - DNA, 401 bp, Homo sapiens
ttgtcttcctataaagagtttttatggcgaacagaaagctgtctggattcttgctatggttgtaggcaggagggaacatggtgtgtggcttctgaacaaactctggctgctctttaagttcaatgaagtgaaaaaaaggcaagttaattgactacagacatatgcaagagagctctcaattgagccataagatcttttggratgtgggtgtttacaaggtagctataagcactctcataagtactgcacctgtgaatcatggactttcattgtacatagctttccactgcttgcttcttgaggctactgttcagcccatcagtaatttttaaagatcctttagaaagttatatagaggaatgcaaatgtgagtaaacaaggcgcctctacctactgatggc

SEQ ID NO: 803 - DNA, 401 bp, Homo sapiens
actatgggtttcatttcatacagtcatatgaaatgaaataattatgtatacaattatatatatatacatatatatagagagagggtgtaaatatataatttattcttaatgctcaatcttatcagagctgaaagatggttacccatgaaggaatcaatgacaccatttcacatatgattgcagttaccattcccttgtagktgctgggctagctctctcagctttccgagatttttttgaggctcagaggacctcctctcctgaatgagaactgggttctaacgaatgaccctaactgtgccctgttacagtggctctgtcttatgcccacgtgaagtgatgtcacagaccatattcacgatatcgaagctacacattactaaaccttctgccgacccaca

SEQ ID NO: 804 - DNA, 401 bp, Homo sapiens
ggaaggagaagttctttcttattcaggggaaggtcgccattttgttctcttcgtgtcttcaactgactagatgagatccagttacatgaggtagggcaatctgttttagtcaatttatatttaaatgttaatctaatctaaagccaccctcacagaaacaccagaataatgcttgaccaaatgttgggtctcctcataacrtacaaagttagccatcacgatattttcctggcatacactgtgaaaccactgacctggaaccctctgacttctgtcagctatttaatagataagtctttctaatcttgagtgtttgtaaagcagttggatataaatttgaaaatttttaaatgaaacgataaatcatgtgtgacctcttgagcctattaatcctaaagtaa

SEQ ID NO: 805 - DNA, 401 bp, Homo sapiens
ctgtggttggtgatatgaagaaaaccatatgtgatagattctaaatatataaccacaaaagccaaactgacggtttggaacatctcagcaactattattgattactacagttgaagaggttgaatcagtttgcatggcaattctcctcctcttcttcctcccatacccactcctcctctttcttatttttctctcttgctytctctctctgttctccattcgttgtttctttctaattcgcagtagcagtagcagcaaccagaaaaatatttgagaactttaaactaaatggttaactaataaggcaataaatagaaggtgtgacactgaacgaggagtaaaagccaatgcattccactacattgagagacatttatgaagtatattgagttacacagaca

SEQ ID NO: 806 - DNA, 401 bp, Homo sapiens
gggctcggtggctcacgcctgtaatcccagcaccttgggaggccaaggcaggctgatcacgaggtcaggaatttgagaccagcctgaccaatatggtgaaaccccgtctctactaaaaatacaaaaattagccaggtgtggtggcacacgcctttaatcccagctactcaggaggctgaggcaggagaatcgcttgaaccygggaggcagagtttgcagtgagccaagatcatgccactgcactccagcctgggcaacagagtgagactacgtctaaaatataaaataaaataaaataaaataaagactaaaaatggcccccaaaagatatcaggttaaatccctggaacctgtgattgttccgttatatgataaaatatatgatttagttaaggatcccc

SEQ ID NO: 807 - DNA, 401 bp, Homo sapiens
gtttgatttttaggaaaagccattttattttaatttttttctatttttttatttttattttttacattgaggttctctttattttttactatttcttttttcttttcgtcttcttttttttttttttttttttgagatggagtttcactctgtcgcccaggctggagagcaatggtgctatctcagctcactgcaacatcygcttcccgggttcaagcaatttcccacctcagcctcccaagcagctgggattacaggcaactgctatcatgcccagctaatttttgtatttttgtagaaatggagtttcaccatgttggccaggctggtcttgaactccttacctcaggttatcagcccacctgggcctcccaaactgcttggattacaggcatgagcta

SEQ ID NO: 808 - DNA, 401 bp, Homo sapiens
ggaaagaattttaaagagacttgggctgagtgcagtggctcacgcctgtaatcccagcactttgggaggcccaggcaggtggatcacgggtcaggagttagagaccagcctggccaacatggtagaacctcgtctttactaaagatacaaaaaattagccaggcagggtggcaggagaatactcaggaggccgaggcaggrgaattgcttgaacccgggaggcggaggttgcagtgagccaagatcgcgccattgcactccagcctgggtgacagggcaagactaggtctcaaggaaaaaaaaaaaaaaaagagagagagagagacttgatggttttctcttgaaaaaataatctcttagccattttccactgccacgagtacatgtacattgaaattagt

SEQ ID NO: 809 - DNA, 401 bp, Homo sapiens
gtgcagtcattgaagatttgtagaccagaacataacatattgaaccccatatctatctatatgccagtgtgtgtacttacatattaatttctcctatgaaagaggaattaataggaaaagaaaagcaaggaagtaatgttcaaaacttccttaatggccaggtgcggtggctcacgcctgtaaccccagccctttgggggrctgagaggggtggatcacctgaggtcaggagttcaagaccagctgaggtcaggagttccagaccatcctggccaaactagtgaaacctcgtctctactgaaaatacaaaaattagctaggcatggtgtcaggtgcctgtaatcccaactacttgggaggctggcacaggagaatcgcttaaacctggaaagtggaggttg

SEQ ID NO: 810 - DNA, 401 bp, Homo sapiens
ccactgtctctgctttcttttatggctaacaagcctatactaccacaagccacatttcatttgatagcatgggtagtggaagagagcatccaaagccagtcaatcctaaatcatgtctgcaaaaatatctgtaaggataaggcctggtggacctcaagaactgtctccctctagtaataatcatataacattattattttkcagtgaaaaattatccagtacacaagcagtctatgcaatgtaatgagaagaatgctttgcaactgtactactagaagcgaactaattcatgatttatttttaagtgattagaacccttagtttatctgtgagaacatcacttaaataaaatgttttaaaatatgcaatgcatatgcaatagcattaaagtattaaatagc

SEQ ID NO: 811 - DNA, 401 bp, Homo sapiens
agtattaaatagcatcttaaagagcaaaagaaactattaagaataattaagtggatttattggctaattggtgtttccacatgtagttatttctgcaattattattcatttgctgatttacatagagctattctctaaaattactctggcattaaatgaagttagaagacatctccagtttggaaaatctattaagcaaakccttttcaacttaaagttgaggtgatactgaatcaaggcctggcagaactgactayagactcagagggagtatgtttattgcttttaattcttcctatttctgtttgaactaacatggcaaaggctttcatmttccaaactacacttatccagtctataaaacaaagatgatattgtttcaactataaagcacagattaa

SEQ ID NO: 812 - DNA, 401 bp, Homo sapiens
ttattggctaattggtgtttccacatgtagttatttctgcaattattattcatttgctgatttacatagagctattctctaaaattactctggcattaaatgaagttagaagacatctccagtttggaaaatctattaagcaaakccttttcaacttaaagttgaggtgatactgaatcaaggcctggcagaactgactayagactcagagggagtatgtttattgcttttaattcttcctatttctgtttgaactaacatggcaaaggctttcatmttccaaactacacttatccagtctataaaacaaagatgatattgtttcaactataaagcacagattaactttgggaggctgaggcaggcagatcaccagaggtcgggagttcgagactagcttg

SEQ ID NO: 813 - DNA, 401 bp, Homo sapiens
ctctaaaattactctggcattaaatgaagttagaagacatctccagtttggaaaatctattaagcaaakccttttcaacttaaagttgaggtgatactgaatcaaggcctggcagaactgactayagactcagagggagtatgtttattgcttttaattcttcctatttctgtttgaactaacatggcaaaggctttcatmttccaaactacacttatccagtctataaaacaaagatgatattgtttcaactataaagcacagattaactttgggaggctgaggcaggcagatcaccagaggtcgggagttcgagactagcttgaccaacatggaggagccccgtctttactaaaaatacaaaataaccgtgtgtggcggtgaatgcctgtaatcctagc

SEQ ID NO: 814 - DNA, 401 bp, Homo sapiens
ttgatacctatggaggaatacattctaaaaataagattttatatctgtttgcatgttaacaaaacttatttgtaaagacacacattctagaaagtaacctcaaaagtactcttataaagcacctcattttgaaagtcaagtagagcaattcctgggcagatgataatgatactgcagagacatgtgaagaaggaaaaaaartaataatttcgctccctgtgttagtctgttctcatgctgctaatgaagacatacccaagactgggcaatttataaagcaaaagagatttaatggactcacagttccacatggctggggaggcctcacaattatggtagaaagcaaaggaggcgcaaaggcacatcttacatagaggcagtcaagagggcatgtgcagagg

SEQ ID NO: 815 - DNA, 401 bp, Homo sapiens
caaaggaggcgcaaaggcacatcttacatagaggcagtcaagagggcatgtgcagaggaactgccctttatcaaaccaccagatctcgtgatacttattcactatcacgagaacaggatgggaaaaacccactgccatgattgaattcccttccactgggtccctcctgtgacacgtgtggattatgggagctggaattasagatgagatttgggtggggaaacagccaaaccatatcactccctaagactattacatttcagcagttagatgaagagagaaggacagggttcagattgaatcattttggatggaggagaacatataaataattgaacaataggagcaccacctagtttagagacaacctaccacaggcaaatacctcacatgacttcatt

SEQ ID NO: 816 - DNA, 401 bp, Homo sapiens
gaagatacttctacagtatcccacagttccacaatctctgattcaggaaattacattaaaagttatatgttggcattttggaatttcatttggtatacatacctgcagacagaggcaataaaatcacatcaatggtcggttacaaatgaagtcatccagttgacccagggtatgctttggctaaattttgttttagatttkccctaaaatataattgcaatattgaatatctctaatagatctcaagggccctctattagtccattttcrtgctgctgataaagacatacccaagactggacaatttacaaaagaaagaggtttattggagttacagttccacayggctggggaggcctcacaatcatggtgaaagtcaaggaggagcaaatcacatctta

SEQ ID NO: 817 - DNA, 401 bp, Homo sapiens
ttggcattttggaatttcatttggtatacatacctgcagacagaggcaataaaatcacatcaatggtcggttacaaatgaagtcatccagttgacccagggtatgctttggctaaattttgttttagatttkccctaaaatataattgcaatattgaatatctctaatagatctcaagggccctctattagtccattttcrtgctgctgataaagacatacccaagactggacaatttacaaaagaaagaggtttattggagttacagttccacayggctggggaggcctcacaatcatggtgaaagtcaaggaggagcaaatcacatcttaggtggatggcagcaggcaaaaagagagcttgtgcagagaaacctccattttgaaaaccatcagatctcg

SEQ ID NO: 818 - DNA, 401 bp, Homo sapiens
aatgaagtcatccagttgacccagggtatgctttggctaaattttgttttagatttkccctaaaatataattgcaatattgaatatctctaatagatctcaagggccctctattagtccattttcrtgctgctgataaagacatacccaagactggacaatttacaaaagaaagaggtttattggagttacagttccacayggctggggaggcctcacaatcatggtgaaagtcaaggaggagcaaatcacatcttaggtggatggcagcaggcaaaaagagagcttgtgcagagaaacctccattttgaaaaccatcagatctcgtgagactcattcgctatcatgagaacagtgcaggaaagaccggcctgcataattccatcagctcccacgggttcc

SEQ ID NO: 819 - DNA, 401 bp, Homo sapiens
accatatgccaatttttttctttgactattgactcactattttataatgcatccttctggcaataatgaaataaaaattagtaaacagaagtaactgtttaatgaaaatgaagtatttgtatttctatttatcaagaaagaaaagacgaacctgtggcatgcagagagtagtctgaatgctattgccacagtggttttatwtttattgtgtgatgtaaccatatgccaatttttttctttgactattgactcactattttataatgcatccttctggcaataatgaaataaaaattagtaaacagaagtaactgtttaatgaaaatgaagtatttgtatttctatttatcaagaaagaaaagacgaacctgtggccgagcacgggggctcacgcctgtaat

SEQ ID NO: 820 - DNA, 401 bp, Homo sapiens
ataaaaattagtaaacagaagtaactgtttaatgaaaatgaagtatttgtatttctatttatcaagaaagaaaagacgaacctgtggccgagcacgggggctcacgcctgtaatcctagcactttcggaggccgaggagggcggatcacctgaggtcaggagttcgagaccagcctggccaacgtggtaaagccctgtctytgctaaaaatacaaaaattagccgggcgtggtggctgatgcctgtaatcccagctactcagaaggctgaggcaggagaatcacttgaacccgggaggcagaacttgcagtgagccagattgcaccattgcactccagcttggggcagaaagaagagaaactcagtytccaaaaaaaaaaaaaaaaaaaaaaagagaaaag

SEQ ID NO: 821 - DNA, 401 bp, Homo sapiens
agaccagcctggccaacgtggtaaagccctgtctytgctaaaaatacaaaaattagccgggcgtggtggctgatgcctgtaatcccagctactcagaaggctgaggcaggagaatcacttgaacccgggaggcagaacttgcagtgagccagattgcaccattgcactccagcttggggcagaaagaagagaaactcagtytccaaaaaaaaaaaaaaaaaaaaaaagagaaaagaaagaaaagaaaagatgaacatgtaacttacacaaaacacttgttgccatttaccatggggatataatgaactaacattcagaagtcacacatatgctgaagaagcatcaggatctacttcaaaagttaaaaacattaaaaaaaaacacagaaaaaaagagtgcat

SEQ ID NO: 822 - DNA, 401 bp, Homo sapiens
tttgggaggctgaagcaggcagatcacttaaggacaggagttcaagaccagcctggccaacaggagaaaccccgtctctactaaaaatacaaaaattagctggtcatggtagcccacacctgtaatcctagctactagagaggctgagaatctcttgaacccaggaggcggaggttacagtgagccaagaacatgccactrcactccagcctgggcgacagagagagactctgtctccaataaatacataaaaataaaaataaaaatttaaatattattgattaaagataagaatgaattagttttgtcactaatttcatacatattaaccatatcatgccactttgaagaagattgtaggtaatttatgaaaaatgttcaaataagactgtattttttta

SEQ ID NO: 823 - DNA, 401 bp, Homo sapiens
ggacaagctttatagtcctagcacttgctgattctttaaatactgtgctttggtccaggggatgttaccttaagcccattttttgtagttagtaaataagacttcttcccaaagtcacgtgcatgttcaagttcttgcattgccagtgtgtaatggataaagacaaatgtatagtaaaaaaatcatgaggcagtctttggktctcatcccagccctgttggctgtgtgatatttggcaaattattttacttctctgagcctcttttctttccattgtaaaatacagagaatgatagttaagagtatttttgtggaaatgaaccaacacaatgcagctcaagtatcttagcagagtgcctgtgttcaataaatattaataaaatgacccttaactcccctca

SEQ ID NO: 824 - DNA, 401 bp, Homo sapiens
ggaaatgaaccaacacaatgcagctcaagtatcttagcagagtgcctgtgttcaataaatattaataaaatgacccttaactcccctcagcaagtttaaaaacaggaagtttccatttcaccatttactttccaattctttgttaaagatggccataataagtaatgagagtgtgcatttgtaaatgtctgtcaccaatgkgaatttacttgagatgactcaaaccacattctatactggaaaaggtgcatttaacgggcaaaagaaaagcccaggccagtttctttctgtatcaaccctgggtaaatctccttaagaaaaaattaacaatcatgatttattcatagggaaagaatttaactacttgttagcattcgaatgggtcctaaggaaactcccaa

SEQ ID NO: 825 - DNA, 401 bp, Homo sapiens
ttttccgatgaagtttttttgctggtccaaatattaattaatcgattgattgaaaatgctacaaaagaggagccattcatcaaagaaccaaatccagtgattcgtgatctggggttttatcacttatatttctagagcatccttttgcttttacaacttaaatttaattgaaattttaatccctagcaggtttttaataaygggcagcttttgagacattaaaaaacattgctctcacttcccagataaggaggttgtccagatatccttatgctttagggagcatttactaagtgatggtacttcccagcgcacatttttggttttgttaaagtatcttaaaccgcccatgtgtagtcaacttccccttatggaatccattgataaatcatggcaaaagg

SEQ ID NO: 826 - DNA, 401 bp, Homo sapiens
caaatcaaaagactagatgtagctaattagacatgggaaaagggtggttctcctgaaaatctggggcctcaggcattttctggaatgtgtacagtcagaacgtgcaagttagtcagcaaagagaaaacaagcagccacacctctcccaaataccgaatagtcatccttcttttgtggttcagaggtgtttgtttgtcttakaatgctgcaacttaaaaccaattgattttaaataaaaatggtaacattataaagtgtgaaagtgtggggttaggaatcatttcccaccctgtgaaaatggctctatggtcacccaggggtgtgtgtgtgtgtgtgtgtgtgtgtgtgtgtgtttgtgtgtttaacctgtgagataagaatggtcaaccagttgactcctc

SEQ ID NO: 827 - DNA, 401 bp, Homo sapiens
actgattgttgtctccaaaacatgttctatcttagacactatctcatcctcttctctgccagatattgattattcatacattctctgatcccaaccaccagctttactcattgttatgtctttgtagctttttcttcccttaaatacaaggacaacctattatttccacaattcagcactttttactgggtcttttacctstctaaacccaacaagagcatcaaagcatgatgttgggcttggtgcctctcttccaccattctttctctttttaactccacatgtgtgctggactcttgcttatgatcttccctgtgtagctaccaccacaaaaatgtgtccccggcctttacaaatgaagtgttcagatgcaagccattctcttatagacatggcagtaa

SEQ ID NO: 828 - DNA, 401 bp, Homo sapiens
atagcccttaattaccagagacttggaactggaggctacactggacctgatatatacacttaacaaagtaacgcttatgtgcctgtggttttacacccccccaccccaaatatctcctagtgactcccctagaaaatgtactgccctggccagattttctttttgctgtcatttcttctcaaatgtattatcattcattgwctaaaaaatataaaagccccttcttcagacttcactgtcttgtgaagatcttcatgtacacgtgaaattaatcaaatgtgtatacttttctcttgttaatctgcctggtgtcgatttggtttctaggtcctgctgaggagcccactaagagctaaaaggaggattgggggtgatcactggctctcctacagttatgccct

SEQ ID NO: 829 - DNA, 401 bp, Homo sapiens
cagagaactacacttgctaagttcagaatactttatcagcttactttgtgtccttgttcccatggtggtgacaccgatcttgaagcttaaaaaatcccccaaattccgcctcccacctctgtgacactcttttgcaaaaatatgcaatttttctacacacatttctgacaaaaaggaaaaaaatgttaagtccaccctagktctgtccagacaagcacagagagaggcgtgttagatttccagacaaatattttcgcctagattttgctcaatgaacttgattcactgcagggctttttttcccacaagcgcgtggcagaggtgggctgccacaggagtggccagtgcccgctctctgcagggcactgctatgaatcaccattttcatgaatggaaagaat

SEQ ID NO: 830 - DNA, 401 bp, Homo sapiens
cattcagtgagaatgcaggagaagtctaagaattagaaggaacaaagaaaagagaatgagcacgggaataaaagtaaataataatcatgtctattcttgattctggggactggctaacttctgtcactttaaaccacttcacctcatttgaaagtccaggcttctcagcttgatgtccaaggttctccatgacacatatcytcttgagcacttcacttcatgccccgaccaagcttggacttcttccccctcacatgcttgctgtttcatgtttcatgttttagctcatgctgttccctctacctggaacatcttggttcactcaactaattctacccatcagaatttagcacaggtgtcctcctctcttcatggtcttcctaaatacctcttgggttcat

SEQ ID NO: 831 - DNA, 401 bp, Homo sapiens
caactacttcctaaagttgaaattgcttccgatttcttttttctctatttcatggataatccatgcagtgtttgctcaacctgtttacactgagatgtgttgaggaactgtcccacggcaagaccacaaggtggggcagtaatgagtaattggaagaaaactgcggtaccttctaaagctcaaatgtggctttctagaacmcgatgaagtggagccctacattcattatttgaccttggttgttttttttttttttttttttttttgagacagaggagtctcactgtctcccagactggagtgcaatggcatgatctcggctcactgcatcctccgcctcctgggctcaagcgattctccagcctcagcctcctgagtagctgggactacaggcgcaagcc

SEQ ID NO: 832 - DNA, 401 bp, Homo sapiens
ccatccttcctgtttgccttccttccttccttttggattatgttgtttcattaaaatatatttagctgggcatagtggctcacacctgtaatcccagcactctgggaggcagaggtgggcagttcacttaaggtcaggagtttaagaccagcctggccaccatggtgaaaccctgtctctactaaaaatacaaaattagcygcgtgtggtggtggacgcctgtaatcccagctactcgggaggctgaggcaggagaattgcttgaacccaaaaaaagcagaggtttcagtgagctgagatcgtaccactgcactccagcctgggcaacagagtgagattccgtcatatatatattcacatgatttaggaaattctgtatttcagcatcacagtataaagac

SEQ ID NO: 833 - DNA, 401 bp, Homo sapiens
gctgaggcaggagaattgcttgaacccaaaaaaagcagaggtttcagtgagctgagatcgtaccactgcactccagcctgggcaacagagtgagattccgtcatatatatattcacatgatttaggaaattctgtatttcagcatcacagtataaagacttaagttctaagagttgatattgctgtagatgttgggaatgraatcttaggagtaacctttaccggaggcaacttctactgcccttgctacctttggtgtgacctgaaaccccctttcttcattagtaccaagtgacttgtttgccactactcagctgtcccagaatagcttgactccacacatccatgcatttctaggaagaaattaggtgcattataaataacgagtcctctgaaaatgc

SEQ ID NO: 834 - DNA, 401 bp, Homo sapiens
aagtatgagcttgggccttgtctgacaataaaaaggaaatgctaggtcccagggaccacttcaagatgtgcttgttcctttaaagcagggagttgtcacatccaatttttaacacatatgtatattttaacacatatgcatattttaacacacatatatatttctgattatactgtaaaactggtaaattatttttaaaamatcataaggcccccaaatcccagagaaagttgtttctattacaattttagtctatttgtctcttttaagtttctcttccctctgagcatatgtatctctaatgcatgtctgcttatgtaggcatatttatacatacaccctttcttttacaaaactgatatcaatttttgtattttaaataaaatacaaatgttttacat

SEQ ID NO: 835 - DNA, 401 bp, Homo sapiens
ggctccagcaataagcctaatgacctctacaaagctgttctgtaatacagaagtaaacacttactctgcacaatttctccttgcatgtgcttcccactggtagaacattattcatcttgttggtctttccaaagagattcattacttccttgctccttcttattcatccttcataatagaaatgctaaaagtctgaaagaygaggaagggagcacatttcctccctgcagtctgaggaatggctgtatctcttcatgagcaccaagaggaagcccccagatgggtccctgtccttacagccttgtttccatgtgcatttccaccccagcctcttccataatcgctccccatctctatgccccagcgatgccagttgttccatcaaacactgtcctctctgt

SEQ ID NO: 836 - DNA, 401 bp, Homo sapiens
acaccttcatcacttgaggcccagataggagtgactgtgcgatgtaaaaaaggcttgccaacaccactgatgtttgacgtgaaggtgaaaagttcagtggcccagagaagtgctttaaagggttcttcttaaatctaacacctgaaggaacaccttcagattatccagcagttgtgatcccctatgcagtgtctatttgtmtagacttcttccccaacacacattccctagtacatttaaatggaaagaaaggtctgggaggttatttgcaggggtgttgatggaaacaggacccatcacagctagggtcatgttatcagagtgcagattttgaattcctttctgcctttcctgcatgactttaagtaagaaaatggtcaccttaaatttgcccaataaga

SEQ ID NO: 837 - DNA, 401 bp, Homo sapiens
acaggacccatcacagctagggtcatgttatcagagtgcagattttgaattcctttctgcctttcctgcatgactttaagtaagaaaatggtcaccttaaatttgcccaataagactcagcttggaaatcattcttgggatgcagaaggatctggtccagaaagcttcagagaagccttgagaactgcctattcaagaggrgaagaaggctgagagagggaacctgcaaagatctagcaggaaaagagtcttctatgtgcaaacaacactagaccctttcccagaattggggcactaacaaaagataatgcctctgaaatattgggaaaattgttggagaatatgatctcgttccctatgctgtcactccaggtaacacccatgatgctcaaaggattttt

SEQ ID NO: 838 - DNA, 401 bp, Homo sapiens
actttatttaacaggtagaaaattatggaaattattataccaagaaaggacataggctaataacataaattaggcttaaggagagtttcataaattatgtatctccaatggattaatgaaggaaattaggaataatttttatattatctctacttttttacttatatatttggacttgaggttttctgcatataatatgcrcactaatataaatattaatataatgctaatacaaaggaatactctctcagagattgtgcattaatgtatgtttcagtgacaaaatatagtgcgtgaccttagccccaggaggaagaataggatatgtgaaagaacctaagattttgracccaggataacctggttttaagcccaggtctgctacttaagagctgtacgac

SEQ ID NO: 839 - DNA, 401 bp, Homo sapiens
ctctacttttttacttatatatttggacttgaggttttctgcatataatatgcrcactaatataaatattaatataatgctaatacaaaggaatactctctcagagattgtgcattaatgtatgtttcagtgacaaaatatagtgcgtgaccttagccccaggaggaagaataggatatgtgaaagaacctaagattttgracccaggataacctggttttaagcccaggtctgctacttaagagctgtacgactgtgagcaagttattttaaattgctggatcttgttttcctcatttacaaaatagaaacactgatatctgcatcatacatcatactattgttatgatttttaaattaaaaatatatgccaatgaacctagcaattggtgaccatattg

SEQ ID NO: 840 - DNA, 401 bp, Homo sapiens
gccacccattaatcctatatattggttctaggacttattcctggagttatatcctgcacattggcttcaggcatgaaggacttgatcccacatcttctccagtgggattgtggagatcgtgtcactgctggcctgtcctgcaggctcttgtggtgatcattataaaagccagccctggggtagctcaggacaggaaaggarggatattctgaaatgattttctccttttagttaacacattttggttccagaacactgagcaaatcatcaactgaagccccatgatatattttcaaagagtgaatttctcttacctgactgaggcattttattctataatagcaattctctgggttttttttttttttcatacttataacaaagcggattaatatatactc

SEQ ID NO: 841 - DNA, 401 bp, Homo sapiens
tctgaaatgattttctccttttagttaacacattttggttccagaacactgagcaaatcatcaactgaagccccatgatatattttcaaagagtgaatttctcttacctgactgaggcattttattctataatagcaattctctgggttttttttttttttcatacttataacaaagcggattaatatatactcacctaaracaccaaagatactgatggctttcaccactctatctaagcaggagtaaacacctgggaactagaaatctgagaaagaggacaacacccaacaccacctaactatggccctcgatacagtcatttaacttaataaccttccgtgagagtaaggtcattatgaaatatgctcggttttacacaaagctttaaaaaaagccac

SEQ ID NO: 842 - DNA, 401 bp, Homo sapiens
tgtttttaaagagctttggatacctgctgtggttaatgtgtcactcactgcgaagctttccaaggcaattattttgatcagaatgtcactcagagttagtaggctggcttcatgaatcatttggggagggtagtataattcaaatttgttatgtattgtcaaacatttaaaaagaataatagtataaaacaaaatacttgyttttacactaaaatttaacatcttttttttttttttctgggaaaatagaatgttgcctaaactgaagtccaaacaactttactttttaccttttcaaatatccatgtggcatcaagccaggccatttaaaatgacatccagttatttaattttaaattcattttgtagaaatcccacctctctggggagtatgtacagca

SEQ ID NO: 843 - DNA, 401 bp, Homo sapiens
gaaagtgctcaaaaatatttgttgagtgaatgacagtagagaaaataaaaatgtcctggattggaatcatgaaaactgtctacttatctctaatattaaaaagctcagtgtaatcttagaaaaaataatctgagagctctgacactttccagaggccacttccacgggaaaggaggagcaaagtctctgatcagaagttgrgtaaatatcctctgaggtccctgattatccagacattgacaaaagaaaggctctccaaggtttgccattattactataaggaagtcccagctcagatgattcatagttaaatatttgcatctcctctggctaagaaaaataaaagccacgacattccagagcctttaggcatgtaagatcttggtactttcccagttatt

SEQ ID NO: 844 - DNA, 401 bp, Homo sapiens
acacacctaccctcactctccacccacccacacacacacacactggaaattgtatcatacacacaccggaaattgtacccaaaggacgctattactaactatgaagcaagtggcacccatggcttgtccagagaagacacccacagggtcagacttcacacaacaagcctatgaatgggatagcccacatttaggagtggwcttctaatccagaatcttctctttatttagttcaagataacataaacttcctttttgtaaatttgtccatcatccactcccttgctcttatactctagtgagggggaggtcagatgataaatgacaaggaagatcatttccagccgtgatgagtgagatgcggaaaacagggcagccatggagcagcgagagaacaacca

SEQ ID NO: 845 - DNA, 401 bp, Homo sapiens
ttgttacatctggctttaagtctccaatgagccctggggaactcaatcccatcaaaggaatttcgagaggagttcacagctcctatctaccatagaagggagaaacaggataaggaatagatccctgataaagcacatgaacaaattaaatccattgttaatttgagtgactggcatagagaggtggcccctacaaaattstcactttttagagtcacggtggttcacagaagaatagaaatcatcttttcctcttaacattatttccatgtactacagttccctctccctaaagtggtctacttgcatttgtcaacactgaaagcaaaaacaaagttgaatatacacccatggtgcatattgttaataaagaagatggaggcaattcagtggtattctaa

SEQ ID NO: 846 - DNA, 401 bp, Homo sapiens
acacatgtaaaaaataaaaaataaaacaatatgcatgtatgcatacatacacacacacacttttagctctgtcttgagctgtcatctcctggggcaggcttaatgacaggtgcaattctggcctaattcaacctcttgaaattgaaaagggttagcaccactcagtggctgctaaatcctagagggcaaaacagcctcctrtgtctcatcccttcatgactgtctcatgggagctcgatttctgtctctttccacctgctaaccagattcgattttgatgctgtaccattggtagtaaaatatacttctttctggtaaaaggagacctgagaaagtagaaatggcattatttaaaggaatttatacataccatataagttggctggatggaccagccaaca

SEQ ID NO: 847 - DNA, 401 bp, Homo sapiens
attttttatgtcatcccctggttctacagaagactgtaaggacagaggaatgaggcatttcgccttgggatcttcagactcagatttctgagtcaggtttgaggttcctgctgtcctgtgggcagtgaggcccagggattacaccaaaggagcaggaacccaatgtcacaggtcccctaactcctgcctagttgcccaggycacataggmacaggcaggggagctggctgatctcatttgtttgttttccgtgtccgttctcaggcagtgataggcatgctatcatctcaattcttaaataaaaccaagttgtatcgttgaagagcagataaagcaaagacagaagcattttaaaaggaattttgtggcttccaaagtacaagtatagagtatttctgagt

SEQ ID NO: 848 - DNA, 401 bp, Homo sapiens
gtcatcccctggttctacagaagactgtaaggacagaggaatgaggcatttcgccttgggatcttcagactcagatttctgagtcaggtttgaggttcctgctgtcctgtgggcagtgaggcccagggattacaccaaaggagcaggaacccaatgtcacaggtcccctaactcctgcctagttgcccaggycacataggmacaggcaggggagctggctgatctcatttgtttgttttccgtgtccgttctcaggcagtgataggcatgctatcatctcaattcttaaataaaaccaagttgtatcgttgaagagcagataaagcaaagacagaagcattttaaaaggaattttgtggcttccaaagtacaagtatagagtatttctgagttaatgaaga

SEQ ID NO: 849 - DNA, 401 bp, Homo sapiens
atatttaattttctaattatgtgcgaaccttggagtcaggattagttgatatttttacaccttcaaatttataaacctagtatgaagtcccatctagactaacaaatgttttataatagaaatttaaatagtactccagttttgtttatgcatttgctgatggtctttcttgctatgaactttagaaactttaaatgtccrtttactcacaatacacacacagcctcaatgacctaataagcagatttgcagagccataaccttgctggcttatgtcagctcgaagtaaarggggaggtggtagtggtgaatctgtttttattactcagtgtttaatcataatgaatcagaggcttttatgagaaaccttctacatcccatgaaagatttgctgatcaaag

SEQ ID NO: 850 - DNA, 401 bp, Homo sapiens
catctagactaacaaatgttttataatagaaatttaaatagtactccagttttgtttatgcatttgctgatggtctttcttgctatgaactttagaaactttaaatgtccrtttactcacaatacacacacagcctcaatgacctaataagcagatttgcagagccataaccttgctggcttatgtcagctcgaagtaaarggggaggtggtagtggtgaatctgtttttattactcagtgtttaatcataatgaatcagaggcttttatgagaaaccttctacatcccatgaaagatttgctgatcaaagatgtagagatttctgttttattagaaaaaattgtttagcacctcattgtggatacagaagacattgtttgttgaaaagtttaagtctttt

SEQ ID NO: 851 - DNA, 401 bp, Homo sapiens
catttagtttgttagatatttaaatctactagacaatctattatgtattctgctcagaaatggttaagacctactgatctagaagacggatctctctgagccataatttctgctcaaggcttgctaggggagatccttctaacttggctttatacacaagaagctagctcacaaaaatgtcggtattctagtagctatgcstttcattgaccagacctgagatttggcctctccatcacttcctctgcaggtgatgtagacatcatttctgctgacatctatgttgatgcagttctagagtcatctgtgtccctattatcctgaaaatgaaaattgatagcaaaggcagataatgtccatttagttctgggtgtaaatgtcttccttgctcttccattgtg

SEQ ID NO: 852 - DNA, 401 bp, Homo sapiens
ggttcatgccattctcctgcctcagcctcccaagcagctgggactacaggctcctgccaccacgcctggctacttttttatatttttagtagagatggggtttcaccatgttagcccagatggtctcgatctcctgacctcgtgatccgcccgcctcagccttctaaagtgctgggattacgggcatgagccaccgtgccyggccaagcatttatcttttctttgtgtcagcaacattataattcttttcttctagctaattagaaatatgtaataagttattgttaactataatttccccactataatatcaaatactgtaagttattccttatatctaactctatttttgtacccattaaccaactgttatttacccctgctcytctccttcccagcat

SEQ ID NO: 853 - DNA, 401 bp, Homo sapiens
atgagccaccgtgccyggccaagcatttatcttttctttgtgtcagcaacattataattcttttcttctagctaattagaaatatgtaataagttattgttaactataatttccccactataatatcaaatactgtaagttattccttatatctaactctatttttgtacccattaaccaactgttatttacccctgctcytctccttcccagcatctgataaccatgatttcacgctctatggagatccttgctttgatgataaattcattaaggacaagaaccctgcagggtgttcaatatgcttcccaggtgccaaatagtctcaatacatattaacagaaagtcagtgtcaactcacctgcacctcacacagtaaattgatttaggcatctcagatt

SEQ ID NO: 854 - DNA, 401 bp, Homo sapiens
agccgtgttgttgcttttccatggacttggaaaacatgaagttgtgtagccgtgtgtctccagacttttaacagcccagaaatggtttcaatgttctgcattaaataaatcgagaagggttagacaaaacagtgtctgaaagatttcatgctgtgagggtgatgagggtgatgggtgacattaatgaatctgaaatggtcrtgactacaaacttgtttttaaaatgtcactttctctaagagaacaaaaacttgaaactcaatgttcatgaatacaagaaggccttttcaaagaaaggccacgggcactctcactaatacacacttggcatttgggtatatccctaagctgtggactgtgtttacatatattactctttcttctcatcactctttaaccaa

SEQ ID NO: 855 - DNA, 401 bp, Homo sapiens
cccatagtcctctatctttaaggaaaatcatggcacttgtttttgaatttttttaatccatcttccagattccaaaactaggaattccaaatgttgtttggacagactgaaaagagaacaaccaataggagaagtggtacactatgagtagtcaaggtaccatacacatgggaagtgtgaaggagacttacttagtatttwcttatgtctctttgccaatatttgggagtttcacagagcatttctagataatgagggatggaagtgaagagtaggacaaggtattcaaagatctaagaagaatgagaaatcctcgatttcccatatgacaggatgacttggttacacgagtaaaytgctttttgtatgtgaaacaggcagcaattggaggtagcaaagga

SEQ ID NO: 856 - DNA, 401 bp, Homo sapiens
ggtaccatacacatgggaagtgtgaaggagacttacttagtatttwcttatgtctctttgccaatatttgggagtttcacagagcatttctagataatgagggatggaagtgaagagtaggacaaggtattcaaagatctaagaagaatgagaaatcctcgatttcccatatgacaggatgacttggttacacgagtaaaytgctttttgtatgtgaaacaggcagcaattggaggtagcaaaggaatacacaggtaagccctggagtccaattcccaaaattagtggtgttttctgattccctaactgactctatggtaggctcctggtcaaaagatccatcagggctgctgggcccatgctgacattccatatagccatcttctttctgattctctgtc

SEQ ID NO: 857 - DNA, 401 bp, Homo sapiens
ttaaagagttttgttctccggtatcaggagttggccacaaatgctttctctataagttcataattcctgttgggaaacttggaaaagagctctccccttctcatccaaagaagtgatgacttctctttgttagtttacaactaacaaagtcccatttctggtttgaaagtcagatggaccttggcttatatttatttaacraagacgtggaatttctctaacagactgaaagtttattagaataacatctagcattaggcctggcaaataggaggtcctcgttaagagatctgatcagatttgacttctaatcccagatataaggtgtttattctttttgagccactatttcctcatctataaaataagaaatattcataactattccataatatgtattc

SEQ ID NO: 858 - DNA, 401 bp, Homo sapiens
ggattatctaccatgtcttccagcttcaatctctataattgtataaatctggttggcaatggactctttagtgcaaagtcctaaagccttcaagacccaaacttttctcactgggcaagcaatttgcgggaaattaaacaagtccaaaatattgaacaaatgaagaaaggggccattttaacagacaggaatacttcataytgtaaagatggccaggtgtagtggttcacacctgtactcccagcactttgggaagttgaggcaggaggattgcttgaggctaggagtttgagaccagcctgagcaatacagggagacctcatctttgctagaactttaacaattagctgggcatggtggcatgcacctgtagtcccagytatgccagaagagaagggagg

SEQ ID NO: 859 - DNA, 401 bp, Homo sapiens
aacagacaggaatacttcataytgtaaagatggccaggtgtagtggttcacacctgtactcccagcactttgggaagttgaggcaggaggattgcttgaggctaggagtttgagaccagcctgagcaatacagggagacctcatctttgctagaactttaacaattagctgggcatggtggcatgcacctgtagtcccagytatgccagaagagaagggaggattgcttgagcacaggagtttgcaactgcagtgagctatgatcttgcaactgtgctccatcttgggtgacagaatgggaccttgtctcaattttttaaaatatatatatacatatatatatatatakagagagagagagactatatatatgtgtgtgtgtatatatatatatabagaga

SEQ ID NO: 860 - DNA, 401 bp, Homo sapiens
gctagaactttaacaattagctgggcatggtggcatgcacctgtagtcccagytatgccagaagagaagggaggattgcttgagcacaggagtttgcaactgcagtgagctatgatcttgcaactgtgctccatcttgggtgacagaatgggaccttgtctcaattttttaaaatatatatatacatatatatatatatakagagagagagagactatatatatgtgtgtgtgtatatatatatatabagagagagagagacagagagagagtaaagatctcatttcctccacaaatgttaaaaacattattctgattttaaaaaaagaatgaatttttaaaatttacaaatttctgaaatggacaaaaatatcctaggccttcttcctcaaaaaataata

SEQ ID NO: 861 - DNA, 401 bp, Homo sapiens
cccagytatgccagaagagaagggaggattgcttgagcacaggagtttgcaactgcagtgagctatgatcttgcaactgtgctccatcttgggtgacagaatgggaccttgtctcaattttttaaaatatatatatacatatatatatatatakagagagagagagactatatatatgtgtgtgtgtatatatatatatabagagagagagagacagagagagagtaaagatctcatttcctccacaaatgttaaaaacattattctgattttaaaaaaagaatgaatttttaaaatttacaaatttctgaaatggacaaaaatatcctaggccttcttcctcaaaaaataataaataagaataataagaaattgcactggtatctgaaaaagcaacttaa

SEQ ID NO: 862 - DNA, 401 bp, Homo sapiens
atttaaataatttaaaatcttaaaataatgattatatgtataataaaactgtaaatttacaattatagagctataaacaattttatagttgtaatattttgtaactaatgaaacattatattttaatgattttattattgttgtaattaatataaagaagataaagaaaaatgggcaaggtttgaataagcacactttgtygaagatatatggatagccaaaaagcatataaaatatgaccaaaagcctctggtgtttagagaaatgcaaattaaagctaaaatgagattcttctaaatacctatcagaatgtctgagattaaaatgactgactgtagcaactagtggcaggaatgtggaggaactgaagttctcatacactgctggcagaaatgtacgat

SEQ ID NO: 863 - DNA, 401 bp, Homo sapiens
aaaatgactgactgtagcaactagtggcaggaatgtggaggaactgaagttctcatacactgctggcagaaatgtacgatgacacaacccttttgaaaaacattttggcagcttcttaacaatttaaatgtacatatcccatgtaagccagccagtccactcctgggtatttactcaagagaaatgaaagcctatgtccayacaaagacttgtatgtaaatatttataacagctttatctgtaacagctaaaagttggaaaccacccaaatgtctatcagcaggtgagcggataaacaaattgcggcatatacagtgtagatagtggaatactactcagtaataaaaaggaatgaacaattgacacatgctacaacatggatgatgcaaaataattacact

SEQ ID NO: 864 - DNA, 401 bp, Homo sapiens
atttttctctgttattctctactgagaggggatgaggaggattaccaaggggcaaggaggaccttttggaggtgatagatgtgtttattactgggattgtgttgatggcttaccaggtatctatgtaagtcacaactcatcatatggtatactgtaaatatgtgcaggctgggcgtggtggctcatgcctgtaataccagyactctggaaggccgaggtgggagaattaaggccaggagtttgagacatagcaagatcytgtctctagtaaataaataaataaataaataaataaataaataaataaatgcacttttttgtatattgagttatatctcaatgaagctgcttttttttaaaaaaaaaaaaaacatataacataaaagagattaacagaagag

SEQ ID NO: 865 - DNA, 401 bp, Homo sapiens
ggaccttttggaggtgatagatgtgtttattactgggattgtgttgatggcttaccaggtatctatgtaagtcacaactcatcatatggtatactgtaaatatgtgcaggctgggcgtggtggctcatgcctgtaataccagyactctggaaggccgaggtgggagaattaaggccaggagtttgagacatagcaagatcytgtctctagtaaataaataaataaataaataaataaataaataaataaatgcacttttttgtatattgagttatatctcaatgaagctgcttttttttaaaaaaaaaaaaaacatataacataaaagagattaacagaagagattcaaaagtctagaacaccaaatattaaaggtagcttttcaaatcagtgagaaaata

SEQ ID NO: 866 - DNA, 401 bp, Homo sapiens
atgactcagcatagtgttaatggtcttccagatgaaggaggggacatgaacatgtgtctgtcccaataaaggttgagacaaggtttgttgtgcacgtgcgcgtgtgtgtgtgcgtgtgtataacagtgaggagactgtaattagcaggaaaaattggggttttgaaagtagaccacagtcttgtcattgtaccatgactcmccaggaggacagaggacaagtaccctactcctgtgtaaatccagactgccaagtagagcactgagatttgatgagtacttaagaaatgcttgcttgattaattggtaaaagatattaaaggggaagattttatatcacattcaaacatatgaagagaaatgttaaaaatgtttaaagttccatttccagtctcactttcc

SEQ ID NO: 867 - DNA, 401 bp, Homo sapiens
atgtggcagactgccagttgccttccccagcataacattttcccaatattcattaggaaaagaaccctttaattgtacccaattaaaataccgaatctcccagcctcttctgcagcagatgtggctgtgtgactaagttctgtccaataagatataagtatacatgtttggtgagatttccaggaaggatgctcaagtggrgatgactaagtcagaagaaagttccttttagctttcctgcattcctagaattctgatgcaaaagctggagctacagcagcaatcctggactatgaggtaaccttgggagtactagggaattgggatgctagtaactttctagaagcaccaactcagccccagaatgcctcctgctgacttcttttacgtgggagagtaag

SEQ ID NO: 868 - DNA, 401 bp, Homo sapiens
gtccttcactagtatggccttttccaatgtcttgaaaggagtcctagtcacatgttcacatgcttacacatttatgtaaaatatgcaggataagataattaaactacaattatctaagatggcagtctttttttcactctgattttctgtccaaaatattcctcttgtggaagtaggtttggaatggccctgaacattttyggaatctgaactgagagaaagttgagtgaaagatacattgatttaaggcatagtgagatgtctagtaaagttattgtaaggtattccagtgttgaaaaggcttccagaaatatgccaaaaccgactgtgctgactcacatgatgtcatgccagaaagatgaagggccagagattgtatgatgacctgagtttgtccttgt

SEQ ID NO: 869 - DNA, 401 bp, Homo sapiens
ccatactgtaaaactgtcttcgcaaaatctcatcacaagctgaaaagtgatccctggtgataaacaactgagatggttattcacctccatgactagcctttcagggcctcactttctatatccatcaaatgggaagaacaatagatgcctcatcctcctcactatgttgctgtgagcatctgttgaagtagtggctattcragtgcattgaaatgcatcagtcagtacacagatacaagggcttctgataactcatacctgaagaatttttgtcaaccctgaagggatttgcttcttggtatacgggtattaaaatactagtataatttctctaacgggagtatgatgtcactagttccagagtcttttcatagatggatgggttttatgataaataactc

SEQ ID NO: 870 - DNA, 401 bp, Homo sapiens
ttgaaatgcatcagtcagtacacagatacaagggcttctgataactcatacctgaagaatttttgtcaaccctgaagggatttgcttcttggtatacgggtattaaaatactagtataatttctctaacgggagtatgatgtcactagttccagagtcttttcatagatggatgggttttatgataaataactcaccctcrgtgttaacttggctttccaactagccaaacaggcctttgtggaacaaggttagcaaatagcatttgggcaaacgatcaaaagggtctccctctcttctatcactctctttatctctcttggtacctctctctgactttctctccctcctttaaaaagttatctctgttttttttaattttttttacattaaaaacaacaa

SEQ ID NO: 871 - DNA, 401 bp, Homo sapiens
aaaagttatctctgttttttttaattttttttacattaaaaacaacaaatgggcccttcagaatagtcgaaaactttagaatgcaaagatatcaaaaaataagaaataacctagatcagaaaacagataaatgattgccaggggttgggattgggaggagttatttacaaggtgaatgaagaaattatgaggggttgtggracttttctatattttgatcttgaaaattatataactatatacttgtgttaatcttgtagaagtgaacactaaaaagggtgaattttattataaacaattttttaagagaacaaaaaatgtactataatcccaccagccaataacacactattaacactttggcgtacttctgactagtcttttttttttttttttttttt

SEQ ID NO: 872 - DNA, 401 bp, Homo sapiens
tgaataaaatgtactccctttactacttttttttttttttttttttttttttttgagacagggtctcaccctgttgcccaggctagagtgcagtggcgtgatcatggcccactgctgccttgacctccagggctcaagcaatctgcccacatctgcctcctgcctgtgttgctcagactggtcttgaactcctgagctcawgcagtctacctgccttagcttcgtaaagtgctggaattacaggcgagagccaacttgcccagccctgtatttcctttactttgaactgcatttgtgtatccttggttcatgttctatttgatagccatttcttcttaattagagggatttcttttttttagattagaaaaactagcccttttggctatgataagtggttt

SEQ ID NO: 873 - DNA, 401 bp, Homo sapiens
aactgcatttgtgtatccttggttcatgttctatttgatagccatttcttcttaattagagggatttcttttttttagattagaaaaactagcccttttggctatgataagtggtttatatttccttttgtgtgctacttgccttttgtctttatttggcttttttttggacttgcattatttatttaagatttacgtagytggatttctttctcctttcacatatggcctctctcacttcaatattatgtagaaaaaaacctctgaaataatgaattcctatacttttatgggttctttttttattttgatatttgacccatctggaatttattttggtataagaatgaggtagattttcaacaatttattccactaaatcataaattagtacacctttt

SEQ ID NO: 874 - DNA, 401 bp, Homo sapiens
ctttctgtgcctggcttatttcacttaacataatgacatccagttccattcatgttgatgcatataacagatttcattctttttatggctgaatagtaatccattgtatgtatatacacatataacgtctgtatatataatgtgtatataaaatgtatatccataatatatgtatatatacacatatatgtaatatatatwgtgtgtgtgtgtgtgtgtgtgtgtatatatatatatatatatatatatatatatatatatctcacttttttttttgagacagagtcttgctgtgttgcccaggctggagtgcagtggtgcaatctcagctaactgcaacctccacctctcggttcaagggattctcatgcctcagtctcccaaaaagctgggactacagt

SEQ ID NO: 875 - DNA, 401 bp, Homo sapiens
agaaaccaaagattagggaaaatatttttagaacaagctcagggaagtcatataggtttaaaatatatagtctatgcaaataatggcacacatttcagaatggaaacaaaaataagtggcagataatgtgtccaagtaatattggtagcaaatggactgttacgagagcaaatgatattttgcagagctgagagtgtgacytgtcttcaattatttgaatccctatcctacaaaagcattgaaaaaggaagatctggagccaatgactgtgtattacatatattttcattcagtacaagcagacatcatcagtgtgctatatactactttcattattattattatcttaattaaagctgtctyacgagccaggcgcagtggctcacgcctctaatcccaac

SEQ ID NO: 876 - DNA, 401 bp, Homo sapiens
cgagagcaaatgatattttgcagagctgagagtgtgacytgtcttcaattatttgaatccctatcctacaaaagcattgaaaaaggaagatctggagccaatgactgtgtattacatatattttcattcagtacaagcagacatcatcagtgtgctatatactactttcattattattattatcttaattaaagctgtctyacgagccaggcgcagtggctcacgcctctaatcccaacactttgggagaccgaagcaggtggatcacttgaggtcaggagtttgagaccagcctggccaacatggtgaaaccctgtcgctactgaaaatacaaaaattagccaggcatggtggcaggtgcctgtaatcccagctacttgggaggctgagacaggagaatt

SEQ ID NO: 877 - DNA, 401 bp, Homo sapiens
ccctgtcgctactgaaaatacaaaaattagccaggcatggtggcaggtgcctgtaatcccagctacttgggaggctgagacaggagaattgcttgagactgggaagtggatgttgcagtgagccaagatctcactgctgcactccagccaggatgacagagtgagactctgtctcaaaaaaaaaaaaaaaaaaaaaaaaargmcaacawcaacgacaaaactgtctcatgatgaaatgggatgctttcactagccgtggttgctcatgcctgcaatcctagcactttaggaggctgaggcaggtgaatcacctgaggttaggagttcaaggccagcctggccaacatggtgaaaccctgtctctactgaaaatacaaaatttagccgggtgtgctggtgca

SEQ ID NO: 878 - DNA, 401 bp, Homo sapiens
ctgtcgctactgaaaatacaaaaattagccaggcatggtggcaggtgcctgtaatcccagctacttgggaggctgagacaggagaattgcttgagactgggaagtggatgttgcagtgagccaagatctcactgctgcactccagccaggatgacagagtgagactctgtctcaaaaaaaaaaaaaaaaaaaaaaaaargmcaacawcaacgacaaaactgtctcatgatgaaatgggatgctttcactagccgtggttgctcatgcctgcaatcctagcactttaggaggctgaggcaggtgaatcacctgaggttaggagttcaaggccagcctggccaacatggtgaaaccctgtctctactgaaaatacaaaatttagccgggtgtgctggtgcatg

SEQ ID NO: 879 - DNA, 401 bp, Homo sapiens
ctactgaaaatacaaaaattagccaggcatggtggcaggtgcctgtaatcccagctacttgggaggctgagacaggagaattgcttgagactgggaagtggatgttgcagtgagccaagatctcactgctgcactccagccaggatgacagagtgagactctgtctcaaaaaaaaaaaaaaaaaaaaaaaaargmcaacawcaacgacaaaactgtctcatgatgaaatgggatgctttcactagccgtggttgctcatgcctgcaatcctagcactttaggaggctgaggcaggtgaatcacctgaggttaggagttcaaggccagcctggccaacatggtgaaaccctgtctctactgaaaatacaaaatttagccgggtgtgctggtgcatgcctgta

SEQ ID NO: 880 - DNA, 401 bp, Homo sapiens
ctttaggaggctgaggcaggtgaatcacctgaggttaggagttcaaggccagcctggccaacatggtgaaaccctgtctctactgaaaatacaaaatttagccgggtgtgctggtgcatgcctgtaatcccagctactcaggaggctgagacaggagaattgcttgaacccgggaggcagaatttgcagcgagccgagatygtgccactgcactccagcctggacaacagagcagaacactgtctcaaaacaaaacagaacaaaaaaagaaaagggatgctttgtggaacagggagattacttgcactggaattgttcaagccaagttctatcaacatttgacacagaaacacaygaccatcgtaaggtctttcccagctcagcattctgtgactgcgtgg

SEQ ID NO: 881 - DNA, 401 bp, Homo sapiens
gagaattgcttgaacccgggaggcagaatttgcagcgagccgagatygtgccactgcactccagcctggacaacagagcagaacactgtctcaaaacaaaacagaacaaaaaaagaaaagggatgctttgtggaacagggagattacttgcactggaattgttcaagccaagttctatcaacatttgacacagaaacacaygaccatcgtaaggtctttcccagctcagcattctgtgactgcgtggtctttgtactgagttttacatgatatggatttcttaccttagaaggatcagtttttaaaagatgggctgaatgaatcaaatcagagaacactatttgcctacccaatatctagtctccacagctagctggggacactttatagccacgttaaaa

SEQ ID NO: 882 - DNA, 401 bp, Homo sapiens
ccttaagaagggagacagaggatgctaacatggaacttgtcctttgccttcccattctcctttctgccatctggatcaggatatctggccatgctgaaatcatgagacaacatgaaggataaaatcctcaaactaagaatagaaatcagaacattaggacctggtctgagttcattgtggagcttccccagcccgctcagkctgcccccagtcttcccatttttagaaaaattaaaactatggtttgttaaagcttctattctgatggtctctgttacttgtagctgaacgcaatgaattgtgagatacgatttaccacaatttttttctttctttctttcttttttcttcttcttcattttttttttttttttwttttttaaagggttgtgccatgtcac

SEQ ID NO: 883 - DNA, 401 bp, Homo sapiens
ttgtggagcttccccagcccgctcagkctgcccccagtcttcccatttttagaaaaattaaaactatggtttgttaaagcttctattctgatggtctctgttacttgtagctgaacgcaatgaattgtgagatacgatttaccacaatttttttctttctttctttcttttttcttcttcttcattttttttttttttttwttttttaaagggttgtgccatgtcacccaggctggagtgcaattgtgcgatcatgactgactgtggtgtcaacctcccaggctcaagcaatcctcccacctcagtctcctaagtagctgtgactataggcatgtgccaccatgccaggctaatttttgtattttttgtagagatggggtcttgctgtgttgcacaggctg

SEQ ID NO: 884 - DNA, 401 bp, Homo sapiens
cctgggaggttgaggttgcagtgagccaagattgcaccactgcactccagcctgggtgacagagcgagatcctgtctcaaaaaaattaaataaatcaatatatggtaatctaatgggatgctatgcagcactaaaagtatattttaaaaaaaacttgagaaatgcttctaagatgaataatacacaattaagtcaattacmtgacttcaaatattattataactgcatgtggacaagaagacaaaaccttcaaggaaaaaaagttttgatattatgagattatgggtaacattgtattcccagccttgaatttctgttattgttactataatatgtgtacaatttttttttagtgaagtaaaacaaacaagtaaaagaaaggttgaaacttcacaatgtag

SEQ ID NO: 885 - DNA, 401 bp, Homo sapiens
tagctgggactacaggcacacaccaccacacctggatatagttttttttttagagatgaggccttctacattgcccagtttggtctcaaattcctgagatcaagcaatccccccaccttggctcctcaaagtgctgggattacaggtgcgagccaccgtgcccagcctcatcagcatttttagacagctacccctctgtgrtactctgtggtgagaaataagtttaagagataagtatgcagttatgaggaaagrtgatagaaccacaccatttttatgaataatatactaaaatatattcttaaaaaacttgtcagttgtatatttgataatagcatatttttacttagtccttattaaagatctcgggaaattcaaatctgtttcatctttgatcagga

SEQ ID NO: 886 - DNA, 401 bp, Homo sapiens
gatgaggccttctacattgcccagtttggtctcaaattcctgagatcaagcaatccccccaccttggctcctcaaagtgctgggattacaggtgcgagccaccgtgcccagcctcatcagcatttttagacagctacccctctgtgrtactctgtggtgagaaataagtttaagagataagtatgcagttatgaggaaagrtgatagaaccacaccatttttatgaataatatactaaaatatattcttaaaaaacttgtcagttgtatatttgataatagcatatttttacttagtccttattaaagatctcgggaaattcaaatctgtttcatctttgatcaggagagaagatgttgcccatccttagcccagagttagaaaggagaaatcatgtgatt

SEQ ID NO: 887 - DNA, 401 bp, Homo sapiens
ctggaaaaatcttctaaaactcttccttctcaagaagtcctgcaactggagctactaatgaaagctctttccagtagcccttacagctaattttctgttcacatatttgtcttctgctgtaaagagctgtgcctcatagtgtattaagggctggcttttcctttcattgtaagggactttccaccacaaacacaaggccaycatggccagcaatgcacaaaacagcagagtatggtcggcccttaaagacaaggtttgacttactcctctcttctcttttttacagacatgtttctctactataaacttcactcttagctttattttcaagaataaaatatttctgttttcaaattggcatcttacgattcagcagactaacccaagaaataattttatgg

SEQ ID NO: 888 - DNA, 401 bp, Homo sapiens
aatgcacaaaacagcagagtatggtcggcccttaaagacaaggtttgacttactcctctcttctcttttttacagacatgtttctctactataaacttcactcttagctttattttcaagaataaaatatttctgttttcaaattggcatcttacgattcagcagactaacccaagaaataattttatggaataatcatawttcaatatcttatttcttttcaaaggaacatttaaaagcttataaaactaggtataacaatgaagctgtaaaagaaagtaagaaaacacaatcaaagttaaaatgaaccaagctaaaaggtaaatataattattggtgttaggctccatatttgcctacaggcttcctaatattcagagcaaaatggaaaacaaactgtt

SEQ ID NO: 889 - DNA, 401 bp, Homo sapiens
aatcaatgtgccccatcttctacccttctgcataggacccccattcccttgacatggtgattttccagaggatgggtacctaggtacctggccaataagagttcgagatcaataagagtcttcccagaggttaatacatatgctttggaatggagtttattgcccactaaagatgctaagctggaaaaatataaattgggrctatccattggctaaattccctgccctgaggagcaggcctgtctccagtgggaggaagaaaactgaacagaggagaattgcaaatggagagagagcaagccctgtgtactgagttctggcttctgtccctgaggccctgaaacctggctgctgcagcttttgattctgaccatgatccaagagtccttccaagcagtgag

SEQ ID NO: 890 - DNA, 401 bp, Homo sapiens
ataaaccttgaataaaagccaagggcataacattaaagcaaaattgagttaaagccattttggaagaattagcccagtgcacatagagtgttcaacatttgagtggctcaattcacccaagaaagcttcaagaagttgaaggacactttttaactttgacagctttcttcatgtgttcctttgtttccccatttacccaarcttctgataaaggttgaataacaagtattttgagattctaattttcaaccagagctaacattttccactactaagtgagaaagggatctaaatgcttcagagactgggggaaattagaggagagcaaagttatgctacttgtatctraatataagaccacttgtctctgcacagaattgacccctgtgggacctttgggg

SEQ ID NO: 891 - DNA, 401 bp, Homo sapiens
ttttaactttgacagctttcttcatgtgttcctttgtttccccatttacccaarcttctgataaaggttgaataacaagtattttgagattctaattttcaaccagagctaacattttccactactaagtgagaaagggatctaaatgcttcagagactgggggaaattagaggagagcaaagttatgctacttgtatctraatataagaccacttgtctctgcacagaattgacccctgtgggacctttggggatacctgcaagatatgcaggctgtttttttctatcaataaacyttggattttcaacaacacaaaaacacatcatcaattagatccccagagtcatgaaccaaaacagttttcacatgaaatttattcaaagtaaggatttgtagtta

SEQ ID NO: 892 - DNA, 401 bp, Homo sapiens
tttcaaccagagctaacattttccactactaagtgagaaagggatctaaatgcttcagagactgggggaaattagaggagagcaaagttatgctacttgtatctraatataagaccacttgtctctgcacagaattgacccctgtgggacctttggggatacctgcaagatatgcaggctgtttttttctatcaataaacyttggattttcaacaacacaaaaacacatcatcaattagatccccagagtcatgaaccaaaacagttttcacatgaaatttattcaaagtaaggatttgtagttacctgttgtgatatgggaaaaccacacagcagcttggcttccagtgtgctttccagagtgaattagttttaaagtgtttattttctttattccctcc

SEQ ID NO: 893 - DNA, 401 bp, Homo sapiens
gataagggagaaagaaggaacaaggccagctagacatgttgtggggcccagtgggaaatgaaaatgctgagtctctcattaaaaaatcattaggaatttcaagagggtaatagtagagcaccaaactgtgcattgtacaggacttttactcataaagccagctctaagaataaaacatcctatattcattatgcccggggygcttccatttactcactgagtgcctaccatgacagccactgtggtaggtacttaattctacctaaaagcaataatacaggattaggatagaagcccaaatgaagaagaaaccaaacatagctccaatttatagcacctaagagcattttcacctgtaaggaattttttctatttttacaggaaaratcaagggatttgcc

SEQ ID NO: 894 - DNA, 401 bp, Homo sapiens
tcattatgcccggggygcttccatttactcactgagtgcctaccatgacagccactgtggtaggtacttaattctacctaaaagcaataatacaggattaggatagaagcccaaatgaagaagaaaccaaacatagctccaatttatagcacctaagagcattttcacctgtaaggaattttttctatttttacaggaaaratcaagggatttgccctgattcttggagtacttaagtgcaaattttgaagcatttcaattgttgaaaacatatctttttttwatatactttaagttttagggtacatgtgcacaacgtgcaggttagttacatatttatacatgtgccatgttggtgtgcttcacccagtaactcgtcatttaatattaggtatatctcc

SEQ ID NO: 895 - DNA, 401 bp, Homo sapiens
agcaataatacaggattaggatagaagcccaaatgaagaagaaaccaaacatagctccaatttatagcacctaagagcattttcacctgtaaggaattttttctatttttacaggaaaratcaagggatttgccctgattcttggagtacttaagtgcaaattttgaagcatttcaattgttgaaaacatatctttttttwatatactttaagttttagggtacatgtgcacaacgtgcaggttagttacatatttatacatgtgccatgttggtgtgcttcacccagtaactcgtcatttaatattaggtatatctccaaatgctatccctcccccstcccccaaccccacaacaggccccagagtgtgttgttccccttcctgtatccatgtgttctca

SEQ ID NO: 896 - DNA, 401 bp, Homo sapiens
attcttggagtacttaagtgcaaattttgaagcatttcaattgttgaaaacatatctttttttwatatactttaagttttagggtacatgtgcacaacgtgcaggttagttacatatttatacatgtgccatgttggtgtgcttcacccagtaactcgtcatttaatattaggtatatctccaaatgctatccctcccccstcccccaaccccacaacaggccccagagtgtgttgttccccttcctgtatccatgtgttctcattgttcaattcccacctatgagtgagaaaatgcggtgtttggctttttgtccttgtgatagtttgctgagaatgatggtttccagtttcatccatgtccctacaaaggacatgaactcatcattttttttggctgca

SEQ ID NO: 897 - DNA, 401 bp, Homo sapiens
acaacaggccccagagtgtgttgttccccttcctgtatccatgtgttctcattgttcaattcccacctatgagtgagaaaatgcggtgtttggctttttgtccttgtgatagtttgctgagaatgatggtttccagtttcatccatgtccctacaaaggacatgaactcatcattttttttggctgcatagtattccatgrtgtatatgtgccacattttcttaatccggtctatcattgttggacatttgggttggttccaagtctttgctattgtgaatagtgccgcaataaacatatcttttttttaaaacttagcatatatctatttgccatctcctgggtcaaaaagccaatggaaagctcaatgaaatctccaaatattcttaggttcaccttga

SEQ ID NO: 898 - DNA, 401 bp, Homo sapiens
tggtgcctccaaggtaactgtttcctctacctggaacactcttcccttgatccttgcatgatttgctttgtcttgtcattccatgaaaataacttttactctgaaaagccttagccaagcccctaaagtagccccacagtcacatccactctcctgagcacttgttaccatctgattatgtttgttggcttgttcgtttgytgactgtttggaatataagcttcacgagggcagctgtgtaccctgttcaatgggacatcctcaacacggaggcagggcctggtacagcacagtcctcaataaatacttgataacaaaataaataatttatgttgcattttggaataataattatattcttagttacacattagctgtatctagaagactgataatactgg

SEQ ID NO: 899 - DNA, 401 bp, Homo sapiens
gttaaaactgaaagtaaatatagacaaaataattgaacatatttgacaaaatatagacatctaaaagtgaaaagcattttaaaagtgagaaaactcctagagagtttgaactattatatggtattttcacctttagattatgaatagcatgaatgagatgataacaatggtaataacaataaattcactataagttcttakaatttagaagataccattctagaagctttccatgaattatctcattaactattactgcagtcttatgaagtgagtattatgatcatttctaatcttatgcatgacaattgagatttaaagagtataactttccaaggtgacaaatttagcaggtgtcagaatccagttctgtcagaagaaataagtagaaaataaaggtg

SEQ ID NO: 900 - DNA, 401 bp, Homo sapiens
ttatgaagtgagtattatgatcatttctaatcttatgcatgacaattgagatttaaagagtataactttccaaggtgacaaatttagcaggtgtcagaatccagttctgtcagaagaaataagtagaaaataaaggtgggtttgttggcgactagataatcataataaacattgatataatcgtttataatttttcataamcgtagaaattatacaacctgtgtaaagccaaaatactttggtgatttctgggttcagaagataatgccttttgtagctatggagcttagatcttgtagctatatgtgtttgactgagggaagtggaaattctctaactgggatatcataccaggatgatgaattacctgtgcaaactctcactattgcaaggtcctatct

SEQ ID NO: 901 - DNA, 401 bp, Homo sapiens
cagacaccatctggtgatggattggtccgtcatgcggtatcagtctgcagaatcatcttcagtactttaaggacagtgcagactagaggaaagattccaggttagatgtcagctatttgccaattagatgacctgggtatgtaatgagaatgcatagccccacttcgtctggtaaattgggactgtaattcttactttgtyttagcccacaggatgatatgtatagaaagtgagttataaactgtaaatgaagctgggcacagtggctcacacttgtaatcccagcattttgggaggccaaggagggaggatcacttgagcccaggagtttaagatcagactaggcaacatagggagaacttgtctctagaataaaatagaaaaacatagccaggagtggt

SEQ ID NO: 902 - DNA, 401 bp, Homo sapiens
aaaacatagccaggagtggtggtatgtacctatagtctcagcaacttgggaagctgagctgggaagatagcttgaggggaggagttcaaggctgcagtgagttgtgattgcaccactacactccagcccgggtgacagagcaagaccctgtctcaaaagacaataatattataaataaataaataaacaaactgtaaatgrtacaaatataaaagagcaatactaacgacaaataataatacatataatgaatgcattgataatgacagtgaaagttagaagtgattcttttagcacagagataagagattagctcatggctcaggccaggcctcacagattatctgtctcctggtgggactaatgcaagatctgaagtttggtctgtaactttgtcattt

SEQ ID NO: 903 - DNA, 401 bp, Homo sapiens
agtgattcttttagcacagagataagagattagctcatggctcaggccaggcctcacagattatctgtctcctggtgggactaatgcaagatctgaagtttggtctgtaactttgtcattttggtttgttctatggaccaaactctggagtactgattaacatcattgtctagcagttgaaagctctctgataaccttggrgagtgctagatagaatagatacaattttgccttttgattttcctttgcccaaacaagtggttcacatatgaagatgtcttttggaagggaaaaataaaaattacagattcccatgtaatagggaaactgagtcttaaaatccaacaccaccatcttatttctaagtcgtttttacattagggcttgttataaacctaggt

SEQ ID NO: 904 - DNA, 401 bp, Homo sapiens
tgtcttttggaagggaaaaataaaaattacagattcccatgtaatagggaaactgagtcttaaaatccaacaccaccatcttatttctaagtcgtttttacattagggcttgttataaacctaggttattttgttttgcctacgtgtaaatcttgatggattcaaaaattccccaagtaacttagtgagatttcaaaaagrtccttgattttagcagcgtttttataaaactgtcagttacagtagataacaatagcaattctattctcctccattttaaactggaatttactgattcaaatttttaagagaaaaagttcctgaacttgtccccttattctaggggaaaccattttggtgcctgtctatagctacttatggcctctctctcttgttttttg

SEQ ID NO: 905 - DNA, 401 bp, Homo sapiens
tcaccgtcacaacagtaccaagggggatggtgttaaaccagtcaagagaaaccacccctatgatccatcacctcccaccaggccccatcttcaacactgggaattacaatagaacatgggatttcggtggggacacagatccaagccatatcacctagtaatcatcctcaccttcagttaaagcagcctgtgtgtttactrawgaaattagctacttgacaccaatcttttcagcaatactgctgtcagataagagaatcattgagtaaaatgccattaattgcaaataataaaacgtcattcattcaaatcacgtaatgagaagtttgaattctgtctccaaaaccaacccttacttttgtttatttatttttacctagtacccagggcatgattctgtc

SEQ ID NO: 906 - DNA, 401 bp, Homo sapiens
accgtcacaacagtaccaagggggatggtgttaaaccagtcaagagaaaccacccctatgatccatcacctcccaccaggccccatcttcaacactgggaattacaatagaacatgggatttcggtggggacacagatccaagccatatcacctagtaatcatcctcaccttcagttaaagcagcctgtgtgtttactrawgaaattagctacttgacaccaatcttttcagcaatactgctgtcagataagagaatcattgagtaaaatgccattaattgcaaataataaaacgtcattcattcaaatcacgtaatgagaagtttgaattctgtctccaaaaccaacccttacttttgtttatttatttttacctagtacccagggcatgattctgtcta

SEQ ID NO: 907 - DNA, 401 bp, Homo sapiens
tttagagacagagtctcactctgttgctcaggctggaatgccgtggtgcagtcatggctcactgcagcctcaaactactggcctcaagcaatcctcctgcctcagcctcccaaatctgtggaactgcatgcatgtgccaccacatctggccctggaatatgattttataagaaagctgtctctctattaaagttttatgcraagaggaaaactaaatcagtggacagagctaagagttagacracccagactttcctccctccgttgcctctgtttctgtctttgcaaaataaggaaatttgactagcttatctttaaaacctctacttgctcattctatgatggtgccttgagatggagattcagtgagagattcttgtttcagtgcttttatatattta

SEQ ID NO: 908 - DNA, 401 bp, Homo sapiens
gtggtgcagtcatggctcactgcagcctcaaactactggcctcaagcaatcctcctgcctcagcctcccaaatctgtggaactgcatgcatgtgccaccacatctggccctggaatatgattttataagaaagctgtctctctattaaagttttatgcraagaggaaaactaaatcagtggacagagctaagagttagacracccagactttcctccctccgttgcctctgtttctgtctttgcaaaataaggaaatttgactagcttatctttaaaacctctacttgctcattctatgatggtgccttgagatggagattcagtgagagattcttgtttcagtgcttttatatatttaacaaattttcaccgagtacctattacgtgtcaggacctgctc

SEQ ID NO: 909 - DNA, 401 bp, Homo sapiens
ctctccttactttcatttcttgacctactcctagacccatgcagataccaaattttacaaattttactaccagcaaatagttatctattatgcagttaaactgtgctatgtgtagggatgcagagcaaatcaagacatagcatatgccttcaagaagccaatgatgtccttgtgagaacaaaactcacatatgtaaaaaawaattgctagttcaaaatgtcagaggctgagaaccaggaatatggcctgaacagttgtgtgctctatcaggagagattcactaaaagttagtagacttcaggaataattttcagtgcacataaagcttgaacttaagtaacataggtagttttcagattttaaaagcaattttcagtaaatacaagtagagatatggcctg

SEQ ID NO: 910 - DNA, 401 bp, Homo sapiens
ctgtgtacactgagataaaagtagagtgggagactgagtttaccacctgtgctaaagcagcagctgttagcattggtgacattcattgttacatggatatcaattgagctgggattaggaagccgcctgtctcctcaagcttgttacgattcagtcacttggaaaaaaacaaaaacagactttcggatgaggattctaatkcccaggtgacctgaaagccaggttcagcgtagtcaatgagcaacatgaaatgaaatttccaatcagaattctcattagccttattcagcactacccagatggatgttccttttgatgtctttgtcatagcagcctcacctatgcaaatattgccagtattaccccttatagtaagttgaagaacttttaagggttgtgaa

SEQ ID NO: 911 - DNA, 401 bp, Homo sapiens
tagtcattgttgaaatccgtaatctctttctatcgccaaattgtcttaaaacgtctgtccagcacatcattgcaaccttgactgtcccttccactgtgtgttgaagagtcacaggtcccagggggagctgcgaagaaacgtaaaccaaataccatttcagtaactgttaagggacaattgtgacgattttgtaatgcttgrcatgttttgcttataatcttgtcctacaaagaagcctatcagcagagatgagagatttttgctatgcaaagattagattaatattgatatttgcagaactgggttcaacctgtgggagacctagtcgcaggtcttgtagaatttatagcatattaagaagatatttaaatatttggcttcagtgtgatggcctcatttct

SEQ ID NO: 912 - DNA, 401 bp, Homo sapiens
gtccgctgaaagatgagtcatcaagtctggttgaacctatctaatatctcttgaatcagtatgtctctgcatctgtattgccatcaccctagttctggccatcctcactgaccacctgactttctgcctaaatggtctcctactttctggtcttgtatactttcaaccctttctctgcaatcagagtgatattgcttccartgttgtacagacaattcttacaaggtcctgcagcttttctttcagtctttctttcttttttttttttttwttttgaaatggagtctcactctgtcacccaggttggagtgcagtgggcgcgatctcagctcactgcaacctctgcctcccaggtttaaacgattttcgttcctcagccttccaataactggggttacagg

SEQ ID NO: 913 - DNA, 401 bp, Homo sapiens
atctgtattgccatcaccctagttctggccatcctcactgaccacctgactttctgcctaaatggtctcctactttctggtcttgtatactttcaaccctttctctgcaatcagagtgatattgcttccartgttgtacagacaattcttacaaggtcctgcagcttttctttcagtctttctttcttttttttttttttwttttgaaatggagtctcactctgtcacccaggttggagtgcagtgggcgcgatctcagctcactgcaacctctgcctcccaggtttaaacgattttcgttcctcagccttccaataactggggttacaggtgcatgccaccatgcccagccaatttttgtatttttagtagaaagagggtttcaccatgttggccaaact

SEQ ID NO: 914 - DNA, 401 bp, Homo sapiens
gtgctgggattacaggcgtgagccactacacccagctctttcagtcttactgttcgtcatttttttccctcccctttctgcaccctcttcactctgctttcccattctctatgcctgggctacatcttaaaagacgccatgttctcctggggtctctggtgtccctgattctggaaatgctttcctgtctcttctctctamcccatttcacttagataagtcctatttatccttgagatttctcataggtggcagtctttttcccataagacttttcctgttctagacctggtggctcacacctgtgatcctagcactttgggaggcacagccagggcgaatgaacccaggtgtttgataccaacctgggcaacatagtgagactccatctctacaaaaaa

SEQ ID NO: 915 - DNA, 401 bp, Homo sapiens
gataagtcctatttatccttgagatttctcataggtggcagtctttttcccataagacttttcctgttctagacctggtggctcacacctgtgatcctagcactttgggaggcacagccagggcgaatgaacccaggtgtttgataccaacctgggcaacatagtgagactccatctctacaaaaaataaacaaccaggcrtggtgatgagcacctgtagtccaggcatggtggtgagcacctttagtcccagctactcaggagsctgaggtgggaggattgcttgagcctgggaggtcaagacttcagtgagccgtgatcatgccactgcattccagcctgggcaacagagcgagaccctgtcttaaaaaaaaaaaaaaaaagaagaagaagaagaaaag

SEQ ID NO: 916 - DNA, 401 bp, Homo sapiens
tgttctagacctggtggctcacacctgtgatcctagcactttgggaggcacagccagggcgaatgaacccaggtgtttgataccaacctgggcaacatagtgagactccatctctacaaaaaataaacaaccaggcrtggtgatgagcacctgtagtccaggcatggtggtgagcacctttagtcccagctactcaggagsctgaggtgggaggattgcttgagcctgggaggtcaagacttcagtgagccgtgatcatgccactgcattccagcctgggcaacagagcgagaccctgtcttaaaaaaaaaaaaaaaaagaagaagaagaagaaaagaaaaactttccctgatatatttaggttgagactagacaccctcttatctgctcccacaatgccc

SEQ ID NO: 917 - DNA, 401 bp, Homo sapiens
atgtgtgtgtgtgtccttttttggggggaggggggctggtggcaggacagggtctcactttgttgcccaggctggagtgcagtggcaggatcatggctcactgcagcctctacctcctgggctcaagtaatcctcccacctcagcctccctaatagctgggattacaggcatgcaccaccatgctcaggtagggttttttwaatttttcatagagacaggttcttgtcatgttgcccagtctggaatatatatatttttttgacttttattttaggttcagtgatacaagtgctggtttgttatatagataaactcatgtcacggggatctgttgtgcagattgttttgtcactcaggtactaagcccagtacccaatacttactttttcttttcctctct

SEQ ID NO: 918 - DNA, 401 bp, Homo sapiens
acatttacaagcaaatgtaaacttttaaggattcttacatcccataaaagcagtaattttggcatatagctcatcaacatgaaatgagtaaaaacatgggaaggcagtactttttgaatgttgtatgccatttggcaaatctacatgttcctcccttttttcgcatctccatgttcctcctaaatgaaggagttgttgttratgttggtttactttaatatgtccaattataccattatcatctatttatcaaaatagtgccatttaattgccttttgctttaagctgtattttatatgaaagattcctagtgttatttctgtcctttggaatattatccagcagagggaattttaggatctacttgataatacagatttgctaatttccacgttagtact

SEQ ID NO: 919 - DNA, 401 bp, Homo sapiens
acaaacctgcacatgtacccatgaacctaaaataaaagtttaaataaataaataaacttggtctccagtgttaaatatgatatgtcatcatcctcatttccttcatccagctattttatattcctcccatctgctctgtcctaatatttatattctgtaggccttatcgtgcatctcttattccttctaaatatgttttaytctgcctggttcctccactcttttggctcttgttttcctacttcctttaatgtaacagtaacacagtgagcacttaatagcagtctagaataaactctgtgttcctgctttaatctatatctggtctttatctctcacctttatctttacctctgtcactgtgtggacttacactgaaaacagaactataccatgccccc

SEQ ID NO: 920 - DNA, 401 bp, Homo sapiens
atccttcacagcaacctacaaagtcaatctggggctggtggaaattctcctctttcagccttttccttcttttggaatttgggggtgttttcacagagtgatttaccaagaaaacattctaaatcctcaaggatcacttatcccttacctcgtggttgtttgctcgagaccaagcacaactggacatttttgaacttacgwctttctccctaccctctttgttctccttctcccccttcataaaatctgacttcagtttggccttcaagtgagattgacttttagccccttccatttggcaaatccttcaacaaaaaaacagaagtgtcatttttacggggtgacaaagcattaagaagatcgctttttcagccttgctgtgcttcattataggtaagtcc

SEQ ID NO: 921 - DNA, 401 bp, Homo sapiens
ctctcagcaaaagagaacgcaaggaatgcatatttcatctcatggcgacctgaggatcgtcctcaattccatatgtaatactttctaaataatggtgacctttttcacgtccccttcctgtatatacaaagtactatgtggataatgcagcctgagtgagcttatgagctaatgcagggatttttattattaacaataatmatagtgaacaacagtttattcatgtaagatcaagcaactagtaagtggtagaaccaggactgggtcatagggtaggtacatgtgtaccacttttaaatattgccaaactactttgcaaagtattgaattattttacattcccaacagcagtgtctgggaattacaataatccttatcatgcaatgactggcgtattcatt

SEQ ID NO: 922 - DNA, 401 bp, Homo sapiens
ccaggactgggtcatagggtaggtacatgtgtaccacttttaaatattgccaaactactttgcaaagtattgaattattttacattcccaacagcagtgtctgggaattacaataatccttatcatgcaatgactggcgtattcattctttttaatttttgacattctaatctgtgtgtagtgccatctcattgtagtttkaatttgcatttcgctagtgactaatgatattgagcatcttttcatgagcttatttgcatatgtatgtcttctttgctaaagtgtctatgcaaatcttttgcccatttattaggttgtttgttttcttatattgagttataactttttttttttttacatattctgcaaacatttttaaccagatatgtagtttacaagtg

SEQ ID NO: 923 - DNA, 401 bp, Homo sapiens
tatatattttgtcagagttcgcccaaatggtacatttatttatctatttatttagagatggagttttgttcttgttgcccaggctggaatgcaatagcacaatctcagctcactgcaacctccacctcccaggctgaagcgattctcctgcctcagcctcccaagtagctgggattacaggtgccagccaccacacccggytcattttgtatttttaatagcaatggggtttcactatgttggttaggctagtgttgaactcctgacctcaggtggtccacctccctcggcctcccaaagtactgggattacaggcatgagccactgtgcctggcccaaatagtacatatttttgatgctattattaatgacattgttttattaatttatatttcaagttg

SEQ ID NO: 924 - DNA, 401 bp, Homo sapiens
caggtggtccacctccctcggcctcccaaagtactgggattacaggcatgagccactgtgcctggcccaaatagtacatatttttgatgctattattaatgacattgttttattaatttatatttcaagttgtttatttctattacagagctttctctactatgctgacatccatctgaggtctcttctcaacagaattgmctttaatgtccacatttctaccaagcttctcttcaaggaaatctatattttttctattactcaccttaaaattcttgtagcctctatccatttcccaattccgaagccatttctacatctttaggtgtttgttagaggagtaccccactttctcgcatcaaagtctgtatcagtcagtgtttgacagagaacagaaccaa

SEQ ID NO: 925 - DNA, 401 bp, Homo sapiens
actcaccttaaaattcttgtagcctctatccatttcccaattccgaagccatttctacatctttaggtgtttgttagaggagtaccccactttctcgcatcaaagtctgtatcagtcagtgtttgacagagaacagaaccaataggagatggataaataggtaggtaggcagattagtaggtagatagatagataggtagrtagatacatagatagataatctatagatatctaatgcctggaaagctaatttttctatatattttctctattattttagttgtttcagatagaaggacaaattggatccctgttactctatcttgaccagagtgaaaatctgattaacttttaatcctcagtctcctcatttgtaaaaygaaaataataataaaatctat

SEQ ID NO: 926 - DNA, 401 bp, Homo sapiens
ggtagatagatagataggtagrtagatacatagatagataatctatagatatctaatgcctggaaagctaatttttctatatattttctctattattttagttgtttcagatagaaggacaaattggatccctgttactctatcttgaccagagtgaaaatctgattaacttttaatcctcagtctcctcatttgtaaaaygaaaataataataaaatctatttcatgaggttattgggatgttagttttgttaatatgtataaaaacttggtgccttgtacataataaatactcaataaatgtatttaaattttgaacaacatatttgacatattgtgattwmcaagtatctatactcttttatgtttgttaatgttatatatggaggcaatctgactta

SEQ ID NO: 927 - DNA, 401 bp, Homo sapiens
tcttgaccagagtgaaaatctgattaacttttaatcctcagtctcctcatttgtaaaaygaaaataataataaaatctatttcatgaggttattgggatgttagttttgttaatatgtataaaaacttggtgccttgtacataataaatactcaataaatgtatttaaattttgaacaacatatttgacatattgtgattwmcaagtatctatactcttttatgtttgttaatgttatatatggaggcaatctgacttaacatcaaaaaaaaaaaaaagaccattcataagatgtagtcagtaccagtaaatgagagcacattttcctctaattgggtgtgtggatattggttttcaccctacttggagtttctgactatttgtcctagtgaccatcacta

SEQ ID NO: 928 - DNA, 401 bp, Homo sapiens
cttgaccagagtgaaaatctgattaacttttaatcctcagtctcctcatttgtaaaaygaaaataataataaaatctatttcatgaggttattgggatgttagttttgttaatatgtataaaaacttggtgccttgtacataataaatactcaataaatgtatttaaattttgaacaacatatttgacatattgtgattwmcaagtatctatactcttttatgtttgttaatgttatatatggaggcaatctgacttaacatcaaaaaaaaaaaaaagaccattcataagatgtagtcagtaccagtaaatgagagcacattttcctctaattgggtgtgtggatattggttttcaccctacttggagtttctgactatttgtcctagtgaccatcactat

SEQ ID NO: 929 - DNA, 401 bp, Homo sapiens
gcgttaataaggaaatgctggatagtcagaatcctacattaacccgagcctaaaatctgtagtatcgcttcaaatatctatgtagaaagcatagtttattaaactaaacatctcctgtaatcccagcactttgggaggccaatgtgggtgaatcacttgaggtcaggagtttgagaccagcctggccaacgtggcaaactmtgtctctaccaaaaatacaaaaattagccaggtgtggtggtgcaaccctatagtctgagctacttgggaggctgatcacttaatttaaaacttaaaagacctaatatccagaatctataaggcacttaaacagattcacaagcaacaaacaaacccattacaaactgggcaaacgacacgaacagacacttttcaagaga

SEQ ID NO: 930 - DNA, 401 bp, Homo sapiens
gtcattcgatgaaataggctgaatttagctaaaagggagttcatgtcctttgaagaaacatggatggagctggaggccattatccttagcaaatgaacacaggaacagaaaacaaaataccacatgccctcacttatcagtgggagctaaacaaagaaaacacatggacacaaagagaagaacaacagacactggggtctrctgagggcagaaggtgggaggagggagaagatcagaaaaactacctatcaggtactatgcttcatacctgggttacaaaataatctgtacgtcaaatgcctgtgacacaagggtacctgtataacaaacctgcatatgtacccctgaacctaaaataaaagttgtttgtttggtttttttgtttgtttgtttgttttgag

SEQ ID NO: 931 - DNA, 401 bp, Homo sapiens
ggttacaaaataatctgtacgtcaaatgcctgtgacacaagggtacctgtataacaaacctgcatatgtacccctgaacctaaaataaaagttgtttgtttggtttttttgtttgtttgtttgttttgagacagagtcttgttcttgttgcccaggctggagtgcagtggcgcgatcttggttcactgcaacctctgcctycttggttcaagcaattctccctgcctcagtcacccgagtacctgggacaacaggcgcctaccacaacgccaggctaatttttgtattttttagtacagatggggttttgccatgttggccaggcttgtctcraactcctaacctgaggtgatctgcccacctcggcctcccgaagtgctgggattacagttgtgagccac

SEQ ID NO: 932 - DNA, 401 bp, Homo sapiens
agagtcttgttcttgttgcccaggctggagtgcagtggcgcgatcttggttcactgcaacctctgcctycttggttcaagcaattctccctgcctcagtcacccgagtacctgggacaacaggcgcctaccacaacgccaggctaatttttgtattttttagtacagatggggttttgccatgttggccaggcttgtctcraactcctaacctgaggtgatctgcccacctcggcctcccgaagtgctgggattacagttgtgagccaccacgcctggcctaaaagtttttttaaaaagagaaaacactttccttaccctttgtagctcattgtctatctaacacaccctgtcactctcatcagccttgaacttcttacaaagccattcaataaaatgaaa

SEQ ID NO: 933 - DNA, 401 bp, Homo sapiens
tgtctatctaacacaccctgtcactctcatcagccttgaacttcttacaaagccattcaataaaatgaaaggaaataggtgcagtgggccccctctgattcgtggctttgatttctttggtttcatttatccacagtctaaaaatattaaatggaaaatttaaaaaaaaaacaattcataagtgttaaattgcatgccatkctgagtagcgtgatgaaatcttgccctgtyccactctgtcccatgcgggacatgaattcttcccctttgtccagcagttcctcactgtctatgcctccgacctgttagtcactcagtagccctctcagttattagatcgaccatggcagtatgggggtgcttgtgttgaagtcacccttattttacttcctaatggcctc

SEQ ID NO: 934 - DNA, 401 bp, Homo sapiens
cagccttgaacttcttacaaagccattcaataaaatgaaaggaaataggtgcagtgggccccctctgattcgtggctttgatttctttggtttcatttatccacagtctaaaaatattaaatggaaaatttaaaaaaaaaacaattcataagtgttaaattgcatgccatkctgagtagcgtgatgaaatcttgccctgtyccactctgtcccatgcgggacatgaattcttcccctttgtccagcagttcctcactgtctatgcctccgacctgttagtcactcagtagccctctcagttattagatcgaccatggcagtatgggggtgcttgtgttgaagtcacccttattttacttcctaatggcctcaaagcacaggagtagcaatgctggagattt

SEQ ID NO: 935 - DNA, 401 bp, Homo sapiens
gaccagcctgggcaagatggtgaaacgccgtctctactaaaaatataaaaattagccaggcacagtggcaggtgcctgtaatcgcagctacttgggaagctgaggcagagaattgcttgaacctggaaggcagaaaagttgcagtgagccgagatcatgccactgcactccagcctgggcgacagagcgacactctgtctyaaaaaaaaaaaaaaaaaaaagaaagaaaaaagaaatgagcaagcactgaacacctactgtgtgcaaggcacttgatagccttcctgttatttcttcctcactacaatcccatgaagtagttcttatccccattttacaagatacaaaaattgactctcaaaaagcttaagaaatttgcttctagttgcacagtcttatag

SEQ ID NO: 936 - DNA, 401 bp, Homo sapiens
aagagcagattctgttgccaccttcccaagcaggtagtgcctttaaaaaacaaaaaacaaatgttcacctactatatgcattaccatgcaccttacacttttcatttaataaatataccccagcaatggtgatagcagattttggaccagcagtggggataaagaaggtcctggtcacctaggtgcctaaagagaagcagrtgaagagagaagaccctggagaaatgttttcctgttttgcacctgcaggtgcttgacatgcctctgaaaatgatctcagtgctgtgcagttccacagctgcagtggtacccacaatgccaaaacttgggatgcaaaggggcgggggtaatgacaaaaatcagggaaggaggaaccatagcaaccacctgatctgcacact

SEQ ID NO: 937 - DNA, 401 bp, Homo sapiens
gtattttatatacctctcttcaatgcctagtgtccttagacagtaagctccctgaagacacaggctatgcctactttattcatcatcgtgtcttcagtgcctagcaccctgcttggtatgcattcggttcatgaatatatgagggaacctgctgctgctgttcagcattcacacctccatttcaaccccatcagaaccttyttcatgcttcctcttttgtagtgtctcagaaactcattctgttttcttcttcatctttttttttttttttttttaatggagtcttgctctgtggcctaggctggggtgcagtggcatgatctcagctcagtgcaacctccacctcctgagttcaagcaattctcctgcctcagcctccctagtaactggggctacaggct

SEQ ID NO: 938 - DNA, 401 bp, Homo sapiens
ttttttttctctccaaacaactggttacccacacttgtacagtcatgtagagacaaaatgctcatttataattccagataccccatgtaattattgcctatgataatcaggtaatctttatgaaactattcctatacaattttcaaatctcagtttacaatcatgagtattttaccataatcttcataatgccctcttgawtatatttgcttaatatcattttgaatttagtgatatttaagttaacatattttatatgttttcatttcattagtaggcttttaaaaatttacttttttgtgagaatctgatttttgtgagactctgtgaacaaatatcctcactaattctttctaatggtataatgtgaatttgtcattgacaagtgttacaaaaaagac

SEQ ID NO: 939 - DNA, 401 bp, Homo sapiens
ttcattccttctttgtcaagccccctaacttccctaaacttcagtgccctcatcttaaatataatgacataatagtgtctctcataagattggtagaattacatgggataattcatcttgcatggtcaggggcacggtctcgggaaccagactgtgtgggtttgagctgctcagtcttggacaaaagattaaatatatctrtgcctttgttttatcatctataaaatgggaataaccatagtaccttattcaaaggttgttgtgaagattaaaataaattaatcctgtaaaaatgcttaggtttctggcacatagtaagggcttagtaaaaactaggtatttttacctggtatgtgcaagcactgtatrtatcctgatatactttctcatctataattctg

SEQ ID NO: 940 - DNA, 401 bp, Homo sapiens
gctcagtcttggacaaaagattaaatatatctrtgcctttgttttatcatctataaaatgggaataaccatagtaccttattcaaaggttgttgtgaagattaaaataaattaatcctgtaaaaatgcttaggtttctggcacatagtaagggcttagtaaaaactaggtatttttacctggtatgtgcaagcactgtatrtatcctgatatactttctcatctataattctgtttctgtgcactagtttatatatttatttaatggaattattttctacagatttagtcagattttagaacacaaagcaagtggatacttagtagccataggggaatctgattttgatgtctcctacccaaagtttattcatatttaatattatatatacataagtctta

SEQ ID NO: 941 - DNA, 401 bp, Homo sapiens
aaattttataaacaagaaggctgggtttgttttttttaagtttttctgtttttaaatttctgtttatttagcgggtacaagtgcagttttgttacatggatataactctggtctttcagtgtaaccatcactcaaatagtgtaccttgtacctattacgtaacttgtcattcctcaccctcctcccaccctcccatctttytgagtctccaatgtctattattccaccctctatgtccatgtgtactcattatttagttcttacttataagtaagaacatgcaatatttgactttctgtttctgagttatttcacttaagataatagccttcaggtccatccatgttgctgcaaaagacatgaattgattcttttgtatggctgagtagtattccatggtg

SEQ ID NO: 942 - DNA, 401 bp, Homo sapiens
tatcagtcatcagcttaatctcaaaatattgtgtgctccataattgaccttcattagggcattatggacaggggcttactatatgctaagctatgtaaatacagatgctcctcagcttataatggggttgtctggataaatccattgtaagttgatccacacataaccctattaaaagtcaaagagcatactgaatgtgtwttgcatttgcaccattctaaaatcaatgtgtcccwtgtgtaaaatcagttgcatccgaaaagcctgaaacgtgtacatattctttgatctagccatcttattctaaaaatcaaaataaaatcaaaataaaatcaaaatataggtaagttgaactgtcataagttggggaccatgcgtactctgatagtcagtgttatgta

SEQ ID NO: 943 - DNA, 401 bp, Homo sapiens
ctccataattgaccttcattagggcattatggacaggggcttactatatgctaagctatgtaaatacagatgctcctcagcttataatggggttgtctggataaatccattgtaagttgatccacacataaccctattaaaagtcaaagagcatactgaatgtgtwttgcatttgcaccattctaaaatcaatgtgtcccwtgtgtaaaatcagttgcatccgaaaagcctgaaacgtgtacatattctttgatctagccatcttattctaaaaatcaaaataaaatcaaaataaaatcaaaatataggtaagttgaactgtcataagttggggaccatgcgtactctgatagtcagtgttatgtatgaacttgaccaagccgcagggtcccagacatttg

SEQ ID NO: 944 - DNA, 401 bp, Homo sapiens
ggctctcctggttctcaggccttcagatttagactgaaactacactatcagcattcctgagtctccaaattgctgactgcagatcttatgactttccagtcattccattccttgtcataactctctttctctttctttctctctctctcctctctctctctctctctctctctacatatatatatatatatatatatatayatacatatatatatatatatatatatgaacagatacatcctattggttctgtttctctggagaaccctgactaatatacagttatgtgtcacttaacaataggatataytccaaaaatgtgtcattaggcaatttcatgatttgtgaatatcatagaatattcttacacaaacctggatggtttgctgcacacctaacct

SEQ ID NO: 945 - DNA, 401 bp, Homo sapiens
ccttgtcataactctctttctctttctttctctctctctcctctctctctctctctctctctctacatatatatatatatatatatatatayatacatatatatatatatatatatatgaacagatacatcctattggttctgtttctctggagaaccctgactaatatacagttatgtgtcacttaacaataggatataytccaaaaatgtgtcattaggcaatttcatgatttgtgaatatcatagaatattcttacacaaacctggatggtttgctgcacacctaacctgatgcacactgaggctttatgggatagcttgttgctcccagactagaaacctgtacagcatattactgtactgaatactggaggcaatttctaacacaatgacaagtat

SEQ ID NO: 946 - DNA, 401 bp, Homo sapiens
tggctctttggccttcacctgtctgcattatggttatagctgagatgccaggaaaaacacaagatgagtctgttcagctcgaagctgactcaactggtttctaccacctcaattcaaactaggaatgagatatttttcttcctttgctttttagggcaattaatgttcccacatatctccctttttcttgccatttcttarcatcctaaacactaattttgcaaaataatgttgtaaatgctttgcatagtcactatcttatgttgcccttcctgttcacaagacagccgtccgtgtcagttgaagatttctatagatatgcatcatctctgatagataaaggcatgtttcagagactatcctggtgggagtattttacttttgaaaccaactaaatctgg

SEQ ID NO: 947 - DNA, 401 bp, Homo sapiens
tgtcattttcttcagtgattttttttccttgggttgttcttatttctacatcattatgtttattatatgaaggaagcagtcagcctcatgtttattctctggtagagaagaggaaaacagtaatttttgagcatgaatgcataagaccatacagtttatggaaatggctgtagcttctctaacctttcccctttcatacayacttgtttccatgtacacttcattccccctttttccccctttaactctctttgtatttgtatccctccttccctatgccctttttactcaattcattccctacatcacaacctgtggtttttgtatctgatcatagttttcaccctattgaaaatcatggctggccaagtacatgttaacaggaaaattctggacagtcc

SEQ ID NO: 948 - DNA, 401 bp, Homo sapiens
atcatagttttcaccctattgaaaatcatggctggccaagtacatgttaacaggaaaattctggacagtccctttgtacacaaaccttactgcttagtttcatctgtgcagattgctgtatactcagccctgcagcagagagaccacactgcagcctttagtaggaaaaggataggaatgacaatacactgcagacacttycgtgagtaagttgctaaagcgtcagtaaaacatcatggtgaggcctctgcaatcagcctgcttagrtttaaatgacaattctgtcacttacaaatatataaccatttggatagttatgtttgcactttaagcctcatgttagttatctggaatagtatataatattacctacctttagtgtcatcataagaattaaatga

SEQ ID NO: 949 - DNA, 401 bp, Homo sapiens
agtccctttgtacacaaaccttactgcttagtttcatctgtgcagattgctgtatactcagccctgcagcagagagaccacactgcagcctttagtaggaaaaggataggaatgacaatacactgcagacacttycgtgagtaagttgctaaagcgtcagtaaaacatcatggtgaggcctctgcaatcagcctgcttagrtttaaatgacaattctgtcacttacaaatatataaccatttggatagttatgtttgcactttaagcctcatgttagttatctggaatagtatataatattacctacctttagtgtcatcataagaattaaatgatttttgtgatataaagtgttaagtgtggtgccagaccctggcaaagttggtaattgtccccttcct

SEQ ID NO: 950 - DNA, 401 bp, Homo sapiens
gggagggttaatagaatggatatctaaagcagcgattctcgaatataggcttttaaccagcagaatcagcattacttgacccgaaaacttgttagaaatgcaaacacttaagtctcacccctaagctcctgattcagaaaatctagggttagggtttaactgtctgtgttttccttgtttttgtttgtttgtttgttttgycgttgttgtttgttttttgtkgttgttttgttttgtttttgagacagggtctggctgtgttgcccaggctagagttcagtggcacaatctcagctcactgcagcctcaacctcctgggctcaagcgatcctcctacaacagcctctgaagtcgttgggaccacaggtgcaccaccacgcttggctaatttttgtattttt

SEQ ID NO: 951 - DNA, 401 bp, Homo sapiens
atctaaagcagcgattctcgaatataggcttttaaccagcagaatcagcattacttgacccgaaaacttgttagaaatgcaaacacttaagtctcacccctaagctcctgattcagaaaatctagggttagggtttaactgtctgtgttttccttgtttttgtttgtttgtttgttttgycgttgttgtttgttttttgtkgttgttttgttttgtttttgagacagggtctggctgtgttgcccaggctagagttcagtggcacaatctcagctcactgcagcctcaacctcctgggctcaagcgatcctcctacaacagcctctgaagtcgttgggaccacaggtgcaccaccacgcttggctaatttttgtatttttggtagagacagggtttttcca

SEQ ID NO: 952 - DNA, 401 bp, Homo sapiens
accacaggtgcaccaccacgcttggctaatttttgtatttttggtagagacagggtttttccatgttgcccaggctggtcttgaactcctgagctcaagcaatcctcccaccttggcctcccaaagtgctgagatacaggcatgaagtcactgtgcttggcgttttaaccagcctgccagatgattctgaatttgaatatyctggtgagaggttttaaatcatgcaagtggctgtctgcctccagttaaggtaaaaagggaaaggcctcagcttacactgtggttgagccatatgacaggacatacaaacactattaatattactagagaagcaaccagcaccgttttgaatagctcagtctattgggggtgtgccttctactcaagatgtaaataaggat

SEQ ID NO: 953 - DNA, 401 bp, Homo sapiens
ttttcttaaggatcaaaattaaaaggtggaaatatacaaacgctaaataatggaattaagcattggccttggataacagaaggtgaaggagataagagacaactttctgttccagctccactttaaccacaggggacataaatatatgggaccttgtagtatttaaccttgttaatatctccatactgttttgcagtaggygttggaacagagcttcacatttttctggtggaggagccagtgatctctggatggtgaaaatattctctaaaacagactccacaactacaatgaccagtacaatgtgttttctatgccgctgtcctctgtcaaggggcatcacaagtggctggcctatattcatgtaaaggtagaactagamcccaatcaatgtgccctat

SEQ ID NO: 954 - DNA, 401 bp, Homo sapiens
catactgttttgcagtaggygttggaacagagcttcacatttttctggtggaggagccagtgatctctggatggtgaaaatattctctaaaacagactccacaactacaatgaccagtacaatgtgttttctatgccgctgtcctctgtcaaggggcatcacaagtggctggcctatattcatgtaaaggtagaactagamcccaatcaatgtgccctataaatacccaagtctttaaatacccttagataataaaggtaaaagatgcaagaaaaagaggactgggagagtggrccaagtttatagttctttcaaagtctatttgaattatttaaaaccattctttttttgttaatagattttaattctcatacatgtcacatgtttcttttgcagaattc

SEQ ID NO: 955 - DNA, 401 bp, Homo sapiens
agactccacaactacaatgaccagtacaatgtgttttctatgccgctgtcctctgtcaaggggcatcacaagtggctggcctatattcatgtaaaggtagaactagamcccaatcaatgtgccctataaatacccaagtctttaaatacccttagataataaaggtaaaagatgcaagaaaaagaggactgggagagtggrccaagtttatagttctttcaaagtctatttgaattatttaaaaccattctttttttgttaatagattttaattctcatacatgtcacatgtttcttttgcagaattcaaaacatttttaaaaacacccatttcaataatattgcatgcaaggtaaacaagaggttagaataactagtacaacataacgcagcttgactag

SEQ ID NO: 956 - DNA, 401 bp, Homo sapiens
ttgtgacttaatggtggcttgtggctccacttcccttgggggttgtttttgttgttcttctctcaggaccacatttattttgatgttttaaaagagaaagaaaagttccaaaaacttcctttctcgtatttcctctttgagatccagcaaaatttctacaactggccttttccagatggcttgcccagaattgctgagagwttgaggcacctcaagctctgggctcaacatcgaaggttctttaaatgtgccttttatcctttagtttctgtcacttgatgatgggtgaccaccctcatctctctctctctctctctcttttttttttttcctactaaacatgagattactggaaatatttcatgattggatacatgctattggttaatccatttaaccaa

SEQ ID NO: 957 - DNA, 401 bp, Homo sapiens
aaggggcttcccccttcacttggcactcactctgtcctgccccttgtgaagagggtgcctgcttctcctttgccttctgccatgattgcaagtttcctaaggcctccccagcagtgtgaaactgtgagtcaattaaacctcttttctttataaattacccagtctcaggtatttcttcatagcagtgtgagaacagactartacactcatcttttgaatacattatgtgaagtacaacaattttttccaaaccaaaccagacctggctaaatcctttactatagaccccaagattgagagagagggaaaaaggaattgatctgaatcaaatttgctgttatcaagaagtagggtagggaagggaccaatatgagatgtacgaaaattggctcccaaagtac

SEQ ID NO: 958 - DNA, 401 bp, Homo sapiens
aacatttttgctctcataacaatgctctgatgaacctcatgcattcatctttgagcttttgaccaattttccttctgtggtaaattcctgaaagtagaattgttgggacaaaagatttagagattttgtatctttaaacatattaccagtttgccaacccaaagggtcatatgagattactttctgcctacagtgtagtaragtgccagcttctcccaacaaccttgccaacgttgggtattgtcaattttttggctctttgccaagctgataggagaatggaatgtctaatggtttttgaattacattctgactgtgctgcatcagactgtaactgaatgcagttgtgatgtatcaggggacctggtttaactcagcacactgtttgaatctgtgtaata

SEQ ID NO: 959 - DNA, 401 bp, Homo sapiens
ttggtacttattgaaaagcagctattgttttaagtcctttgcatatacatttctatgatttactatatatcagtagcatttctccaacccatcttggctaggcaagcaccactgaatatgaaggaggccaaatagaatgatactatccaagctgcaaagaaacaaacaaaagaaaacatctaaatgcatgcctctttggartggcatttgcatccgttgccaatatccatagaacaaatgccttcaggcaggaagaagttgggataatgtcaatgtttttaatagctgtagtagagtcctatttagaaagcagtaattatctctccatattgattttttacatcccctcaataaatccagaagaaatgtgaagaccatctgtaagtgtgatttttaccagg

SEQ ID NO: 960 - DNA, 401 bp, Homo sapiens
atctaagagatctagagcccatattgcccacagagctgaaaacatatgtacatctaaccctttgcaggaaaaaacttgttaaatcatgattgagattatagtagtattatttctgattgactaggtagtaattggtcccagcatgtaaagtttctaatattaaagtcacacgatagaggagctagaggcttaagaaaagtrtacatgaatttatttatttggaataggaagggaaacatccctggtatcatcatgatggcatatagaggcagggctgagagctagaatacagaatacgtcctttgctagaaacagtttctcgggctgggttagagtgggtagaaactatggatcatcctgccgcaggtccaagtaaacaggatttggcgctctacataatg

SEQ ID NO: 961 - DNA, 401 bp, Homo sapiens
taaatatataacatccactgagtgttggccagcgttgactgggggttgttctccacatcacgtccctaagggaccaacagtgttggaggagtctctcttctcatattgatgttcaccatggcaaaggcaatgatcacagtgaaccacatgctacattttaagcttctacctggacaccacacaagtcacttccactcccakttcggtggtaaagcaagtcaattcaagtctgacttcagcatctttgggaaatataattccaccccrrgaggggaagcagatatgggtgaaatgtaataaaattcacctctcccataaagtcctagtagcattgttttatttgagtgaattcttttttttttttttcttccttacagatcctctttaaaacatcagcctgg

SEQ ID NO: 962 - DNA, 401 bp, Homo sapiens
taagggaccaacagtgttggaggagtctctcttctcatattgatgttcaccatggcaaaggcaatgatcacagtgaaccacatgctacattttaagcttctacctggacaccacacaagtcacttccactcccakttcggtggtaaagcaagtcaattcaagtctgacttcagcatctttgggaaatataattccaccccrrgaggggaagcagatatgggtgaaatgtaataaaattcacctctcccataaagtcctagtagcattgttttatttgagtgaattcttttttttttttttcttccttacagatcctctttaaaacatcagcctggaaacagtatctgtagaaatcagttttgttagttctaaagcagggcttcattgttgggatgtgttgt

SEQ ID NO: 963 - DNA, 401 bp, Homo sapiens
aagggaccaacagtgttggaggagtctctcttctcatattgatgttcaccatggcaaaggcaatgatcacagtgaaccacatgctacattttaagcttctacctggacaccacacaagtcacttccactcccakttcggtggtaaagcaagtcaattcaagtctgacttcagcatctttgggaaatataattccaccccrrgaggggaagcagatatgggtgaaatgtaataaaattcacctctcccataaagtcctagtagcattgttttatttgagtgaattcttttttttttttttcttccttacagatcctctttaaaacatcagcctggaaacagtatctgtagaaatcagttttgttagttctaaagcagggcttcattgttgggatgtgttgtc

SEQ ID NO: 964 - DNA, 401 bp, Homo sapiens
cagggtgagagtttggtggcacggagtgaggctagaggtgggcgtgtggagagtctgatatcctgatatcaaagcaattccattcagacttaggcctgagctgctcccagtcatccaagtcatttttactaatatctgacaacttgcaaatattgtgttacgttcaacactgaaaatgaggactgtgcatttccttttgtytaaatgatgattaaatggtgaagcagctacagaagtattgactaacgacagcatccatttactagaaaatatgtcatttgctactgcaaacatttatggtctgattatacctcatgttacactgcaatggtttgggttttttttttttttttgtatttttggtacatcagaaacacttttcccaatgtttgttagtttaa

SEQ ID NO: 965 - DNA, 401 bp, Homo sapiens
atgattaaatggtgaagcagctacagaagtattgactaacgacagcatccatttactagaaaatatgtcatttgctactgcaaacatttatggtctgattatacctcatgttacactgcaatggtttgggttttttttttttttttgtatttttggtacatcagaaacacttttcccaatgtttgttagtttaagcattgktcaacatttatttattaagcattgactttataaaataggtaccaggaatatgaaaatgagtaagatatgttccctgacatccagtagctcatagtctagagatgtcaccataataataactagcatttattggacaccacctgtgtctcctgaagcctgttacctcatttaattttgacaaaaccttatgaagtgaatat

SEQ ID NO: 966 - DNA, 401 bp, Homo sapiens
  misc_feature (1)...(401): n = A,T,C or G
attctttgaaatctgaaataagtcctaaccttatacattcaccaggagtgtgtattaatcacttctcacactgctgataaagacatacctgagactgggtaatttataaagaaaaagaggtttaatgaactcacagttccacatggctgggaagacctcacaagcatggtggnaaagtgacaggcacatcttacatggcascaggcaagagagaatgagagcaaagcaaaagggaaaacaccttataaagccatcagatctagtgagacttattcactaccacgagtattgtgttgagggaaaccacccccatgattcaactgtcttccaccaggtccytcctacaacacatgggaattatgggagctacaattcaagatgagattcagatgggaacacag

SEQ ID NO: 967 - DNA, 401 bp, Homo sapiens
  misc_feature (1)...(401): n = A,T,C or G
ccacatggctgggaagacctcacaagcatggtggnaaagtgacaggcacatcttacatggcascaggcaagagagaatgagagcaaagcaaaagggaaaacaccttataaagccatcagatctagtgagacttattcactaccacgagtattgtgttgagggaaaccacccccatgattcaactgtcttccaccaggtccytcctacaacacatgggaattatgggagctacaattcaagatgagattcagatgggaacacagccaaaccatatcagagtgtatactttcattttattcctcaatcttcattccttaagttttcaacaaataatttgcttttgaaaggattaggagcttaagttggctttatagttatccagtaaccttttgatttctcca

SEQ ID NO: 968 - DNA, 401 bp, Homo sapiens
actatgttttcagtaggacatatctgatggaaatacatttcttttgatattatttattataactggtgagctacattccacccaatagtaaatgcctctcagcaaaaagatagatacttttgatagttaatatattcagatattatgttgtttgtggaaaccataacttaataaattttaaaacagtgtcttctttaaaartaattttttattaaactttgtattttgaggtaattgtagattcacatgcagctataagaaataatgcaaacaatactttttacccagtttcctccaatggtgacatcttgaaaactatcgcacaatagcacaactttgatattgacactgatacaatcaagatacagaacattttcatccaggcatcccctgtgcttagc

SEQ ID NO: 969 - DNA, 401 bp, Homo sapiens
ctataagaaataatgcaaacaatactttttacccagtttcctccaatggtgacatcttgaaaactatcgcacaatagcacaactttgatattgacactgatacaatcaagatacagaacattttcatccaggcatcccctgtgcttagcccttttgtagctacgtctacttcctttgcccaccctcaccttaaaaccctgscaataattaacattttgtcatttcaagcatgttatataaatggaaccatagagtatataactttcaggtattggttttttccaatcagcataattctttggagattctttacttagcatacttctctggagatttatctaggtgcttgtgtactagtagttcattctttgttatcgctgcatagtatttcatgctaggga

SEQ ID NO: 970 - DNA, 401 bp, Homo sapiens
tccacaaggcaagagcttttaattttgataaaaataactttttatacttaattggcaaccaaatacctaaatgtcttttgatagaaaaacttgtcctagataatgtaaaatcattttacatattcacagatccatctccactaatgtcatataagtttaaaaatcacaaagtaatttgaacagattcctaaattataaatyagttaacagttattttttgctctaatctttagttgtacatttacttcaaataaacatttgttaaaaacgtactctgtactgaggaatgaggatacaaaactcataatttgtcatttctttgcttcagggacttacattttactggattacatctaaatttttatttggcagttttattccaggaagatcatgacagtctt

SEQ ID NO: 971 - DNA, 401 bp, Homo sapiens
gactgaatcagttcaaagagcctcgatagctttaaatgtctgtgattgatttttctgcagagcaagatcaaacaaaacagtatttcctagctgctgcccttacatgtagtggtgattcacagagaatttggggaggaaagtagccattatgggatgttttgcaaaaggcaataccaagattgatcatcacctgagggcgayacactatagttgttcctctgtatccatgacagattagtcccaggaccccttgcagataccaaaatccacagatgctcatgtcctgcttataaaatggcatagtatttgtacacagccttgtatatcctcctgaatactttaaatcatctctagattacttataatacctagagttgtataaatgctatagaaagtattgt

SEQ ID NO: 972 - DNA, 401 bp, Homo sapiens
aaacaaacaacaatgatactggccaactgacttctctcacttctctcttctcttttctttaattcattccttacctatttagaatagctgaggctcatttttatcttcttatgacagccagaattgtcatctattaagattaagtaaggaaggcataattgatattcacaaaccaccccaggatttatcagaagtgagggwgtttcatatggattactaattgtctaaaatttggctctaagcacctgaagatcactaggcaggagagaagagtagggtttgttgtacatgagaagaggctgtggggtgggggatgttcaccgagaagactgctttggtctttgatactagcatttttccttctatatggttaacaaggcacatattttcatttttatatc

SEQ ID NO: 973 - DNA, 401 bp, Homo sapiens
tgtggggtgggggatgttcaccgagaagactgctttggtctttgatactagcatttttccttctatatggttaacaaggcacatattttcatttttatatccccagaataaaggcttgaaaggaaacaaaatctcaaataaatggactaatttgttaaattctggactaaacctcagtttattttaacagctttaacaackgtctctggagctcataacacatatagagcactattggtgtcacacaaaaccttgaaatcagaattgccacagaccgaatctgatctgaaatggcatttcattcaactgcagctttgtgtcacaagaacctgtctctgttttcctaacatgggtatgatgcatattcagaagcagccgagtgatttacttcttttttcatt

SEQ ID NO: 974 - DNA, 401 bp, Homo sapiens
ggctggtcttgaactcctgacctcgtgatccacctgcatcggcctcccaaagtgctgggattataggcataagccaccttgcttggccctaaaatacttttaataagattgtctcatccttctcttggttttccaatggaaatggtggtatagcaagtccatctgaaacacttctgcaaaataacaatgaagctaatcacygtgggaaacatttacatcatatgtatttgcatacagaggaaattgataatcttgagacatcagcatactagaatagcaagagacatgttttattctattatattctcttagtcagcaatktttaattgttgcttaaaggaaactgaataaaacgtgggcgcagtggctcycacctctaatcccagcactttgggaagttg

SEQ ID NO: 975 - DNA, 401 bp, Homo sapiens
tctcttggttttccaatggaaatggtggtatagcaagtccatctgaaacacttctgcaaaataacaatgaagctaatcacygtgggaaacatttacatcatatgtatttgcatacagaggaaattgataatcttgagacatcagcatactagaatagcaagagacatgttttattctattatattctcttagtcagcaatktttaattgttgcttaaaggaaactgaataaaacgtgggcgcagtggctcycacctctaatcccagcactttgggaagttgaggagagaggatcgcttcagcccaagagtttgagaccagcataggcaacatagtgagaccccatctctacaaaaaatattttttaaaattagtcgagcatggcggtggctccctgtagtt

SEQ ID NO: 976 - DNA, 401 bp, Homo sapiens
cttctgcaaaataacaatgaagctaatcacygtgggaaacatttacatcatatgtatttgcatacagaggaaattgataatcttgagacatcagcatactagaatagcaagagacatgttttattctattatattctcttagtcagcaatktttaattgttgcttaaaggaaactgaataaaacgtgggcgcagtggctcycacctctaatcccagcactttgggaagttgaggagagaggatcgcttcagcccaagagtttgagaccagcataggcaacatagtgagaccccatctctacaaaaaatattttttaaaattagtcgagcatggcggtggctccctgtagttccagctacatggagggctgaggtgggaggatcacttgaaccagggaggtc

SEQ ID NO: 977 - DNA, 401 bp, Homo sapiens
tagaacattattttaaagtttaggtatttcatctgagtatattactctggctttcctaagctagcttagttatatatgttcacttcagtttgagtctccactaaattttaacatgaacaaaatattatatgcaacaccatagaagcaattgttaaatcattgttacttttaatatcacctaaatctaacctaagtaaatgygtttatttttattaccaactgatgtagatatacccacatggacagaaaacagcataaaccaccaaaaggacttgaaaattccctcttcaagacttcttttgccaatgactaatgtttaatgctatttgctagagattctggtgccaggaggatttctaaccaggttattttatcaataggaataaaatatcgagggctta

SEQ ID NO: 978 - DNA, 401 bp, Homo sapiens
cacatggacagaaaacagcataaaccaccaaaaggacttgaaaattccctcttcaagacttcttttgccaatgactaatgtttaatgctatttgctagagattctggtgccaggaggatttctaaccaggttattttatcaataggaataaaatatcgagggcttaaattagtgtaatctctcaagatcttgaatttgacrttttcataatttttacttaatcatagctcctggggattggaattactcttttagctggcccgagtctgggaggaggatccaaagtctttgagttgttttcttttatttctttttagcccctaaagcactggaaatggttggccctgaagtgctcctaaggtaaccgcaagatgaggcaaaacaggattgagatgaaaacc

SEQ ID NO: 979 - DNA, 401 bp, Homo sapiens
gcctgggcaacagagcaagaccttgtctcaaataataataataatatataaataaacaaataaataaaattatcctaagtgaaatcagttgttgatagaactgaagtacatcaagcctagtgggactgtggttgtctctccagcctaaaaaaaaaaaagaacaaaaacaacaacaaaaaaacttaactccaaaattgctgytgctccatttatttcaggtgtaagacttctttgagatttaaaaacaatataatcatttacaatgtactttgttggacctaagcataggaaaattcattcattcattcattcattgagtacctgttatatgccaggcaatgcactaggcaccatcaaagatgaataagctatgtgctaaaattcacagtctaacagaagaa

SEQ ID NO: 980 - DNA, 401 bp, Homo sapiens
gtcaccacacctggctattttttgtattttttgtagagatggagtttcaccatgttgcccaggctggtcttgaactcctaggctcaaatgatcctcctgcttccaccttccaaagcgctgagattatagacgtgaaccactgcacctggtctagaaattatttaataataaaaaaatgaagacagaattcaatgaagagcrtagaagagtctcttaaacctytgttttaagctatgagccaggaaagagatggtggcaagggtgagatggttgcagtgcttttttgttcacttatctcaggcctgtgtgttctgagttaaagacaagtcagttggcaagagaaggagagaggaagcttcccagaaccatttgaaggaaaatttggaaagtcttctctaagg

SEQ ID NO: 981 - DNA, 401 bp, Homo sapiens
ttgtattttttgtagagatggagtttcaccatgttgcccaggctggtcttgaactcctaggctcaaatgatcctcctgcttccaccttccaaagcgctgagattatagacgtgaaccactgcacctggtctagaaattatttaataataaaaaaatgaagacagaattcaatgaagagcrtagaagagtctcttaaacctytgttttaagctatgagccaggaaagagatggtggcaagggtgagatggttgcagtgcttttttgttcacttatctcaggcctgtgtgttctgagttaaagacaagtcagttggcaagagaaggagagaggaagcttcccagaaccatttgaaggaaaatttggaaagtcttctctaagggagttgccctcaactaccttt

SEQ ID NO: 982 - DNA, 401 bp, Homo sapiens
aattataatttttctcaaacttcccaaaagtggaacattgtgggaaataatatgggagtggacatttgaatttctgtttgactttgcagcagaaatctcttttctaactctctctttcaatctcaccatcagagccatctgattgcttgataacatgattctttttgcccagcccttgttatcctccctcctgccctagtmaccatgacataggctccactcatttctacctaggaacctggatgcactgctttgcactattgcctcctggcaaaacagggcaatgagaaaggaaatggaagcccaaattcagagccctccttcccagcacaagaatgaggagatgccctttttccccggggagggggattcttccctctctcttcagtaattgtctttat

SEQ ID NO: 983 - DNA, 401 bp, Homo sapiens
ttttttgacatgtattatttgatgaaaccctatgagattaggtctttacttccgaaagaagaaaaccaaattcaagggcaattaaaaacttgtcaaatgtctcaattttagtaagaaaaaaaaccgacattggcctagatcttaatctgtgcccagtcctcttcccatccctctttttttttttttttttttttttttggkgggctgctctcaaatttttgggctcaaatgaacctcctaccttggcctcccaacgtgctgagattacaggcatgagccaccgtgcctggccagctaaggttaatttagtattgaaraaatatttttgttatgaatttagtgtagccaagtgtgcagtgtttaraccatctacagtaatgcacattaatggcctaggcctt

SEQ ID NO: 984 - DNA, 401 bp, Homo sapiens
aaaaaaaccgacattggcctagatcttaatctgtgcccagtcctcttcccatccctctttttttttttttttttttttttttggkgggctgctctcaaatttttgggctcaaatgaacctcctaccttggcctcccaacgtgctgagattacaggcatgagccaccgtgcctggccagctaaggttaatttagtattgaaraaatatttttgttatgaatttagtgtagccaagtgtgcagtgtttaraccatctacagtaatgcacattaatggcctaggccttcacattcactcaccactcactcactgactcacccagagcaatgtctagtcctgcaagctccattcatgggaaaggcctcacacatgtataacatttttttgtcttttattctgtat

SEQ ID NO: 985 - DNA, 401 bp, Homo sapiens
cccatccctctttttttttttttttttttttttttggkgggctgctctcaaatttttgggctcaaatgaacctcctaccttggcctcccaacgtgctgagattacaggcatgagccaccgtgcctggccagctaaggttaatttagtattgaaraaatatttttgttatgaatttagtgtagccaagtgtgcagtgtttaraccatctacagtaatgcacattaatggcctaggccttcacattcactcaccactcactcactgactcacccagagcaatgtctagtcctgcaagctccattcatgggaaaggcctcacacatgtataacatttttttgtcttttattctgtatttttctatgtttagataagtttagatgtataaatacttatccttgta

SEQ ID NO: 986 - DNA, 401 bp, Homo sapiens
gagtgcaatggtgcgatctcggctccctgcaaactctgcatccggaattcaagcgattctcctgtctcagcctcctaaatagctgggactacaggcacgcaccaccacgtccagctaatttttgtatttttagtagagacggggtttcactatgttggccaggatggtctcgatctcttgacttcgtgatcctcccgcctyggcctcccaaagtgttgggattacaggcatgagccactgtgcccggcctcatgtagagcactttaaaagtacattggatccatagtaatcacttaactatgaacttgtatatccatatcaaaacttcatgttgtacagcttaaatatagacaataagaataaaataaataaatgaaaatattttaatatgctgagccatg

SEQ ID NO: 987 - DNA, 401 bp, Homo sapiens
taccatacatatactgatgacacctaacactctagttctcgtctgtgtctccctgaactccagactcgtaggtccaactgacttctgcatatggctgtccagtcggcatctccaattgaacatcgtcagaacaaaacttcaggcttttccccaaccagctcttctggtcttgcccatctcaataaacaccactgctatctrcccaattaattgagccggctatctggtagttattcccttctttgcctcactgtcttctgatccccatatcctataaactctaataccaagtatccctggaatcctttcagtttttcctatctttacttcttctccttagtctaagctattatactctcttgcatagtttagcggtagtttttaagccctttttttatttt

SEQ ID NO: 988 - DNA, 401 bp, Homo sapiens
ttccaagagcacaatacagcaaaaagtgagagttatctatttctcccttcttcatccgaatacaaaatacatcctattttactgctttttttttgtcttttgcctctactttaagacttatctaagaaataaagaaaagccaaccactcgttctatccacagaagaaaaacacacaccagcatagacaacacaaaagactrtgtctagatgttaagactatatatcctataggactataattttcatagatctaaaaagtgagaaacatatatatgtataaaattatgtgggatgcaagttactgagattttgaatatggggctctgtcatttaccctaaaatgttcagtggtcttttctattttttctctattctcagtaaaatagaactttctcaacaa

SEQ ID NO: 989 - DNA, 401 bp, Homo sapiens
tcaaaggggaatttattaacaattttatttctgagaggatatgacaacaacaaagacattaataaaaaacaccagcgagctttctggcaatatgtattaaaattttcaaaaacacttatactctcgaatccagcagttattatttcgggaaattgctctaagaatattatctttttatacaaagcattttctgaagagaaktattcaggaaattttcatttatgaacagaaaaagtccaacattatggaaatagtgatataaaatacagcatatatagttctttggtattttacagtcatgtaatcatggagagaaatacttcagataaattaacataataaaccacaatacaaaaaagtatatttacaatagaaaaaaagtttaaaagtgtgttagcaat

SEQ ID NO: 990 - DNA, 401 bp, Homo sapiens
tttcttcaaagtaaaatgaagtggttaaacaggattactccccagatgtctccccaaactttacactggtgtaataattgtttgcaaggatcattgggtgattatgtctaaaagcctgcagttattagtcctcatatcaggaatgtgctatccccattcattttattgtagaacctggtttgctgtgggatagttgaaatwtgaagaattcacttggtcagtgtgtttcacggccttgctactttttctgcttggatggactcacttctctatatgattttctctttaaatcagaagtatttgacctgaagcagtaactcctctattcatataatagtgatattctgatacatatgtgaatattataaaaataagtagaatgataatattattactaatat

SEQ ID NO: 991 - DNA, 401 bp, Homo sapiens
atataaacacaaagcaacataggagaaaagtactagttacatgcccatggcaagaaaatatgcctgaaatggttctgtttattttgttgttgttgtttctgcttggaatttcagcagttatttggcaaagtgattagctagctgggaaggaagaaagctcgtctccatcagccttttgtcagagcccgccttttggtcccrgagcccccatgaaagtgtgctgtagaccaggaccactgttgccctgaatgcatgagtatgcagcctttttatcgtaggcttgtcatctcctgagttctgcaatagatgccatgtgaaatccagtatatactcagtctaacacatagctgctgcataagaaaatttctttccatgcttaagcaatttctgcatagagctta

SEQ ID NO: 992 - DNA, 401 bp, Homo sapiens
aagtcacaagtgggtgagaaccacaggagagaaacagtcagagggtgatgacagccagaactggtatgatgtgaaaggtcaatgacatcagaaacggcctcagggattttatagcctggctccttcaatttcagttcttggtataggccagcttttcaggactgttgattgtccctcttctttgtgtgaaattcctagtgsacagagcttctgcagtgcctcttaggtactttgaaaatcccaacgataaacatctggacccaacacagaagcctccaggaagctgtcttgttggcagtcacctacgagcaggcgataaacacaacacattaaatagtatgtaatgctccagggattgcagtcctctgcctcctaatctctctgtcctttcctcttttatt

SEQ ID NO: 993 - DNA, 401 bp, Homo sapiens
gagcttctgcagtgcctcttaggtactttgaaaatcccaacgataaacatctggacccaacacagaagcctccaggaagctgtcttgttggcagtcacctacgagcaggcgataaacacaacacattaaatagtatgtaatgctccagggattgcagtcctctgcctcctaatctctctgtcctttcctcttttattgacytgtcaggagcatgacasttgtgcacaaccattagcacacaagaaatgactttcctgtgggggtgatggggactggggaacctactctttgagatagaaagttaccctgatgcagaataattacagtccagcttagcctccttataagcgattaatcttacttttcctcttagcttctgtctgtttgtaacctgaggttga

SEQ ID NO: 994 - DNA, 401 bp, Homo sapiens
cttaggtactttgaaaatcccaacgataaacatctggacccaacacagaagcctccaggaagctgtcttgttggcagtcacctacgagcaggcgataaacacaacacattaaatagtatgtaatgctccagggattgcagtcctctgcctcctaatctctctgtcctttcctcttttattgacytgtcaggagcatgacasttgtgcacaaccattagcacacaagaaatgactttcctgtgggggtgatggggactggggaacctactctttgagatagaaagttaccctgatgcagaataattacagtccagcttagcctccttataagcgattaatcttacttttcctcttagcttctgtctgtttgtaacctgaggttgaccgaagttagttctttt

SEQ ID NO: 995 - DNA, 401 bp, Homo sapiens
agatagaaagttaccctgatgcagaataattacagtccagcttagcctccttataagcgattaatcttacttttcctcttagcttctgtctgtttgtaacctgaggttgaccgaagttagttcttttagttggttcttgagaaaaccctttcagtctgtatttccaggaataaatcttaactctaatttaaaaaacaaaarggccctataaatagttacttcaaaccctttaatttatagctgcattctcaatgtcttcatcctcccaaaatcactcacctctacatttttgccctaagtacctaggttagcacaacttttcacaacttctctttaacatttctctgaataacgtgaaccttccttatttccttaaaatataaacttatatatgttcttcc

SEQ ID NO: 996 - DNA, 401 bp, Homo sapiens
ttggaagtgtctcttcttttggaagtgggagaccaagtggaggggaagaacatgaacaagggattgaagccattgagaaagtcatttattcattcgatagatatcttctgagcactgcgctaggacctaaggacagaataatgaaggcagagtttatccttccactagcacagcagtcaaaaccaataggaattaagattrtcagaagtgacaaaactgtacatagacctgttcacataactaacaagggaaacgatggaggtgatrtggaagtctgaacgtggtgcaggaataactcagccaacatccccctcctttgggaaatttagatagatgtaggtagattgagaagtgatataacagtcatgtggcatcattgagagagtcagttttctataatg

SEQ ID NO: 997 - DNA, 401 bp, Homo sapiens
aagccattgagaaagtcatttattcattcgatagatatcttctgagcactgcgctaggacctaaggacagaataatgaaggcagagtttatccttccactagcacagcagtcaaaaccaataggaattaagattrtcagaagtgacaaaactgtacatagacctgttcacataactaacaagggaaacgatggaggtgatrtggaagtctgaacgtggtgcaggaataactcagccaacatccccctcctttgggaaatttagatagatgtaggtagattgagaagtgatataacagtcatgtggcatcattgagagagtcagttttctataatgacaaagacatggaaagagagatgtttagtacatgtacagcagaaggagttgattcacaacgcaatg

SEQ ID NO: 998 - DNA, 401 bp, Homo sapiens
agcagggttattattaaaactctgatcccccaagtccaactgaaggggctccagtcactaccccatcatctcagtggtgagatgtagtcaaggcatctaacctctctgcctcagtttcctcatatgtaaaatagagacaatcattataaagtgtttagcagaatgccagatccacagtaaatatcagtaaaaggaaatttrtaaatttgtaaattgttagggaatggggtgagaccctcaagattctaatcttcaagggaaagaggatgctaaggaaagtcagaggaagcccgagaatcctaagagaggatgatacaagcaaattaattaaggaataagatcaaagaatattgggaaatgtttaatccacttggtgtgggaaaaggacttttwtgtttgtt

SEQ ID NO: 999 - DNA, 401 bp, Homo sapiens
ggaaatttrtaaatttgtaaattgttagggaatggggtgagaccctcaagattctaatcttcaagggaaagaggatgctaaggaaagtcagaggaagcccgagaatcctaagagaggatgatacaagcaaattaattaaggaataagatcaaagaatattgggaaatgtttaatccacttggtgtgggaaaaggacttttwtgtttgtttgtttttgagacggagtcttgctctgtcgcccaggctggactgcagtggtgcgttctcggctcactgcaagctccgtctccctggttcaagcgattctcctgcctcagcctcccgagtagctgggattacaggcgccagccacaacgcccacgcccagctaattttttttttttttttttttgtagtagaga

SEQ ID NO: 1000 - DNA, 401 bp, Homo sapiens
ccgcccgcctcggcctcccgaagtgctgggattacaggcgtgagccactgagcccggccgaaaaggactcttttttttttttttttacacagagtctcgctctgttgcccaggctggagtgcagtggcgccatctcggctcactgcaagctccgcctcccgggttcacgccattctcctgcctcagcctccagagtagctsggactacaggcgcccgccaccacacccggctaatttatttatttttttctttttttcttttttgtatttttartagagacggggtttcaccgtgttagccaggatggtctccgtctcctgacctcatgatccgcctccctcagccttccaaagtactgggattacaggcgtgagccaccgcgcccgaccatgaaaaggac

SEQ ID NO: 1001 - DNA, 401 bp, Homo sapiens
tttttttttttttacacagagtctcgctctgttgcccaggctggagtgcagtggcgccatctcggctcactgcaagctccgcctcccgggttcacgccattctcctgcctcagcctccagagtagctsggactacaggcgcccgccaccacacccggctaatttatttatttttttctttttttcttttttgtatttttartagagacggggtttcaccgtgttagccaggatggtctccgtctcctgacctcatgatccgcctccctcagccttccaaagtactgggattacaggcgtgagccaccgcgcccgaccatgaaaaggactctttttaacctcttctccatgtctaatctgagtttcaacctttttattcttattctgttataagtacttctc

SEQ ID NO: 1002 - DNA, 401 bp, Homo sapiens
tgtgtttgctggtactgaatcctaccctaatacttccgaaatgaacctcattggataactcaactcttcattatgtttttgctaatcttttaggagcctttttgcaacccaccgtctccctaccctcgttgggtctttttttttttcttcttcagtcagggttttgctctgtaacccagtggggaaagtggcatgatgatrgctcactgcagccycaaattcctggactcaagctattttcccgccttaccttcctgagcagctgggactataggcgcatgccatcatgcgtggctaatttctaaaaaatatatatttttgtagagacatctctctatgttgcatttctggtcttgaactcctaggcgcaagcaatcctcccacctcagcctcccagagtg

SEQ ID NO: 1003 - DNA, 401 bp, Homo sapiens
ctgaatcctaccctaatacttccgaaatgaacctcattggataactcaactcttcattatgtttttgctaatcttttaggagcctttttgcaacccaccgtctccctaccctcgttgggtctttttttttttcttcttcagtcagggttttgctctgtaacccagtggggaaagtggcatgatgatrgctcactgcagccycaaattcctggactcaagctattttcccgccttaccttcctgagcagctgggactataggcgcatgccatcatgcgtggctaatttctaaaaaatatatatttttgtagagacatctctctatgttgcatttctggtcttgaactcctaggcgcaagcaatcctcccacctcagcctcccagagtgctggggattgcagg

SEQ ID NO: 1004 - DNA, 401 bp, Homo sapiens
gtggcgcgatatcaactcactgcaacctctacccctgggttccagtgattctccagcctcagcctcctgattagctgggattacagacacccgccatgacaccctgctaatttttgtaattttagtagagacagggtttcaacatattggtcaggctggtctcgaactcctgacctcaggtgatccacccaccttggtctytcaaagtgctgggattacaggtgtgagccacygtgcccggcccttggcctttattcyttattttccctgatattaatccctaatgaaatgcatttagtacacattcatctttttaaaatgtgcagtttttgtcacagaagtagtgtaaaggacaccagaatggttggaagacgatttttgtggtcttctacaagtcctgt

SEQ ID NO: 1005 - DNA, 401 bp, Homo sapiens
ccctgggttccagtgattctccagcctcagcctcctgattagctgggattacagacacccgccatgacaccctgctaatttttgtaattttagtagagacagggtttcaacatattggtcaggctggtctcgaactcctgacctcaggtgatccacccaccttggtctytcaaagtgctgggattacaggtgtgagccacygtgcccggcccttggcctttattcyttattttccctgatattaatccctaatgaaatgcatttagtacacattcatctttttaaaatgtgcagtttttgtcacagaagtagtgtaaaggacaccagaatggttggaagacgatttttgtggtcttctacaagtcctgttttggtgactctgagcaagtcttaaccttgcc

SEQ ID NO: 1006 - DNA, 401 bp, Homo sapiens
ctcagcctcctgattagctgggattacagacacccgccatgacaccctgctaatttttgtaattttagtagagacagggtttcaacatattggtcaggctggtctcgaactcctgacctcaggtgatccacccaccttggtctytcaaagtgctgggattacaggtgtgagccacygtgcccggcccttggcctttattcyttattttccctgatattaatccctaatgaaatgcatttagtacacattcatctttttaaaatgtgcagtttttgtcacagaagtagtgtaaaggacaccagaatggttggaagacgatttttgtggtcttctacaagtcctgttttggtgactctgagcaagtcttaaccttgcctacatttcctcacatttagggcaag

SEQ ID NO: 1007 - DNA, 401 bp, Homo sapiens
accagaatggttggaagacgatttttgtggtcttctacaagtcctgttttggtgactctgagcaagtcttaaccttgcctacatttcctcacatttagggcaagtgtactcttcagggtcaactgcaatatctgtgggagtgctttgtgttttgtagcatgcatcttactagtgcttttgttgttgtttgcgttgtcgtgygggttccccacctcccccataacactgtaaagaaatgctgagactaagtggtagggagtggcagccatctggtgaggatggaaagttaatatctttatttatgtaataaacctccctttagaattctgttactgtcaaatttctcctggaattctaatagtattttcgctatgtgttttgaccttttgctattgggaaga

SEQ ID NO: 1008 - DNA, 401 bp, Homo sapiens
ttatgatttccgcagacttaaatcaaccctgggcttctatccttatactagttttattttatgttttttgtttgtctttagagaaatgatcgtgttctgtcatccaggctggagtgcagggacataatcacagctcactgcagcctcaaactcctgggctccattgatcttcctgcttcaacctgctgagtagctaggacyacaggcacgcaccatcaggcccaactacatttttaaatttttttctagagacgatgtctcgccatgtttcccaagctggtcttgaaccctggcctcaagcaatcctcccacctcagcttccctaagtaccaggattacaggcataagccactgagcccagccccacccttacatgttttctcttggcatcctgatccctg

SEQ ID NO: 1009 - DNA, 401 bp, Homo sapiens
gtttcccaagctggtcttgaaccctggcctcaagcaatcctcccacctcagcttccctaagtaccaggattacaggcataagccactgagcccagccccacccttacatgttttctcttggcatcctgatccctggacacaaccccattgagatacccttccatttaatacttttcttagtcatttaccaaatgtgtttayagtaatatattcccatatatttgtggcagagtacagcactcatataaattttgatgaacacagacatgctgtcccatacttgtaggtaaaacaatcatgtgaaattaaaataaatattttgtttagatagatcttgactatcatacacttattctaacaatattgcccattcctcaaaacattctgggaactccttgaaa

SEQ ID NO: 1010 - DNA, 401 bp, Homo sapiens
gtttatttatgcaaagcacataggatcataggattgctctctaggagaatggagtaattaataccatgaagactcatagacaatgcttcctcccctagaaactcattatttttcgaattttggcactgatctttcctgcctacttcctggcttttactaccttgtgaaaaagccccaagtgttagaagcagcttccccagyttactgccatcccttctaaggtccctggacaccactgcttgtctcctaccttagaaagtgcctacttggccaggcacgctggctcacgcctgtaatcctagaactttgggaggctgaggcaggaggatcacgaggtcaagagatcgagaccatcctggccaacatggtgaaaccccarctctactaaaaatacaaaaatt

SEQ ID NO: 1011 - DNA, 401 bp, Homo sapiens
gtgttagaagcagcttccccagyttactgccatcccttctaaggtccctggacaccactgcttgtctcctaccttagaaagtgcctacttggccaggcacgctggctcacgcctgtaatcctagaactttgggaggctgaggcaggaggatcacgaggtcaagagatcgagaccatcctggccaacatggtgaaaccccarctctactaaaaatacaaaaattagctgggtgtggtggggcatgcctgtagtctcagctacttgggaggctgaggtaggagattcacttgaagccgggaggtggaggttgcagtgacctgagatcacgccactgcactccagcctggtgacagagagagactctgtctcaaaaaaaaaaaaaaaaaaaaaaaaagtgccta

SEQ ID NO: 1012 - DNA, 401 bp, Homo sapiens
gggtagagaaagtattacatatctgcatgtgtggatgtgaaggacacacagatacataaggtaaatgagaatttattataaaggtgtatttgacaaaaattggggaaaaaaggaaaattggagaagatatctttctgtgagattaaagacaaataggggaaaaaagggaccaatgacaagaattagagcaaggtatgtaawgaattccagagctggctctaagagatagagcagctggtcatatrtgaaagggatgattcattcttcaggggctatccctcgtgatcctatttccttgcacaagctatcagttaatttattgattcacctcctttatgtgctcataggcatcaagaatacaatggatcacatacaattacagaaaagtttcatttcaggag

SEQ ID NO: 1013 - DNA, 401 bp, Homo sapiens
cacacagatacataaggtaaatgagaatttattataaaggtgtatttgacaaaaattggggaaaaaaggaaaattggagaagatatctttctgtgagattaaagacaaataggggaaaaaagggaccaatgacaagaattagagcaaggtatgtaawgaattccagagctggctctaagagatagagcagctggtcatatrtgaaagggatgattcattcttcaggggctatccctcgtgatcctatttccttgcacaagctatcagttaatttattgattcacctcctttatgtgctcataggcatcaagaatacaatggatcacatacaattacagaaaagtttcatttcaggaggtcaaacaggaagtttctttctgacttatattgaagtactcatg

SEQ ID NO: 1014 - DNA, 401 bp, Homo sapiens
ttcatttcaggaggtcaaacaggaagtttctttctgacttatattgaagtactcatgatgacaatggagaaaaatgaacataatcttttatgggtggggaccatgtgatctcttttctttcaagctccagagggtttataagacatttccatgttcaatttgattccggaaattatatgttgggtagaacagactcttttyggcaactcatgagaattgccaatgatcccagcatttgctactcttgatagtaattcccttcatttcctccatttttatacatgacctgcagtaaatattgacagttactttgctggaaagaataacacagagacagcttttcttaagctccaaactgaatttcgtggttaattgattggccagctggccctgccgtctct

SEQ ID NO: 1015 - DNA, 401 bp, Homo sapiens
tgggaggcagcaaatgcccaaatggaagacaatgtatgtagatcaaagaagccgatgagacagagagttcataaaatgtgaatacaattccaggggagaattgatgattatggaagcagaaagccaattgagttaaatattcattccagcaacaagtctgatcgtctcactgggacctgtgcctttccgaagtttcctcakcttttcaaggtctacacaaggaaagaacaaagccatcaaggaggctctcattctggaaagccggctgcaagatggcatgaaccagaggtcagcggccaccactgagagttcatcgtattcgcctctgtaaagaataagcctcaagcagtggttctgcaggagcggttcagcatcatcaataccaatgagccctaatgaat

SEQ ID NO: 1016 - DNA, 401 bp, Homo sapiens
aagaatttgtcagggtcccagtccctgtaccttatgggagaattaaattcattaaactgggccagatgtggtggctcacactggtaatctcagcactttgggaggctgaggcaggtggatcacctgaggtcaggagcttgagaccagcctggccaacatggtgaaaccccatctctactaaaaataaaaaaaattagtcargcttggtggtaggtgcctgtaatcccagctagtcaggaggctgaggcaggagagtcgcttgaacctgggaggcagaggttgcagtgagccgagatcgtaccactgcactctagcctgggcgacagaatgagactcagtctccaaaaaataaataaataaattcattaaactgaacaaattgagcccaatttatttgtcat

SEQ ID NO: 1017 - DNA, 401 bp, Homo sapiens
ataatttattctcattattttttgtttgttttttgagacagagccctgctctgtcatcagtctggagtacagtggcgcgatctcagctcactgcaatccctgcctcctgggttcaagtgattcccctgcctcagcctcccgagtagctgggactacaggcatgcatcaccatgcccagctaattttttctattttggcagrgatagggtttcaccaggttggccaggatggtctcaatctcctgaccttgtgatgtacccrccttggcctcccaaagcgctgggattacaggtgtgagccaccacgcccagcccattcttgtttcttggtaaaggaaaatccaactatatatatcttctttaggatcacytaaagacccatacagatctgtcaaatagaca

SEQ ID NO: 1018 - DNA, 401 bp, Homo sapiens
tctggagtacagtggcgcgatctcagctcactgcaatccctgcctcctgggttcaagtgattcccctgcctcagcctcccgagtagctgggactacaggcatgcatcaccatgcccagctaattttttctattttggcagrgatagggtttcaccaggttggccaggatggtctcaatctcctgaccttgtgatgtacccrccttggcctcccaaagcgctgggattacaggtgtgagccaccacgcccagcccattcttgtttcttggtaaaggaaaatccaactatatatatcttctttaggatcacytaaagacccatacagatctgtcaaatagacatccaatattttggtaggctttgaaaggaggtgcaaaaggatgagaaggaatttagggaga

SEQ ID NO: 1019 - DNA, 401 bp, Homo sapiens
catgcccagctaattttttctattttggcagrgatagggtttcaccaggttggccaggatggtctcaatctcctgaccttgtgatgtacccrccttggcctcccaaagcgctgggattacaggtgtgagccaccacgcccagcccattcttgtttcttggtaaaggaaaatccaactatatatatcttctttaggatcacytaaagacccatacagatctgtcaaatagacatccaatattttggtaggctttgaaaggaggtgcaaaaggatgagaaggaatttagggagatcattatctgaatcattgaacaaatgctccttaagcacctggtgaagagaggctactgagaagcagagcacgtggtcccagcctacgaggtgacaaagtaaaatggcag

SEQ ID NO: 1020 - DNA, 401 bp, Homo sapiens
gtcaaaggatccaaagtttcagttagacagaaaaaataaacttcagtgatctattgcacagcatggtgaccacagttaaaaataatgtatggtacatctccaaattgcttaaaaaaaaaaaaaaggtttcaaatgttgtcaccacagaaaaacaaaaacaaaaacaaaaaaaacaaaaaaaacgaggcaaggtgatggagwtgttaattagcttgatttaaccttcctacaatgtatatgtgttagtccgtttttgcgttgctgtaaagaagtatctgaggctaggtaatttgtaaagaaaagtggcttattttggctcatggttctgtagactataaaggtagcgtggtgctagcatctgcttttggtgagggctcagaaagcttccartcatggcagaa

SEQ ID NO: 1021 - DNA, 401 bp, Homo sapiens
aggtgatggagwtgttaattagcttgatttaaccttcctacaatgtatatgtgttagtccgtttttgcgttgctgtaaagaagtatctgaggctaggtaatttgtaaagaaaagtggcttattttggctcatggttctgtagactataaaggtagcgtggtgctagcatctgcttttggtgagggctcagaaagcttccartcatggcagaaggcaaagggggagcccacatatcagatggtgagagggagcaagagttgagggggaggtgccacrctcttttaaacaaccagatctcatatgaactcagagcaagaactcactcattatcgtgagaacaacaccacgctattcacaagggatccacccccatgaccaaaacacctcccactgggccccac

SEQ ID NO: 1022 - DNA, 401 bp, Homo sapiens
taaagaagtatctgaggctaggtaatttgtaaagaaaagtggcttattttggctcatggttctgtagactataaaggtagcgtggtgctagcatctgcttttggtgagggctcagaaagcttccartcatggcagaaggcaaagggggagcccacatatcagatggtgagagggagcaagagttgagggggaggtgccacrctcttttaaacaaccagatctcatatgaactcagagcaagaactcactcattatcgtgagaacaacaccacgctattcacaagggatccacccccatgaccaaaacacctcccactgggccccacttccaacactgcgggttacatttcaacatgagatttaaaaccatgtcagtatacatacatacattaaaatatgca

SEQ ID NO: 1023 - DNA, 401 bp, Homo sapiens
catacatacattaaaatatgcatcacattgtgccctatacacatataaattattgtttgtcaattaaagaaagaaataattttaaaataaataggccaggcgcagtggctgatgcctataatccaagcactttgggaggccaaggcaggcagattccttgagcccaggagttcaagagcagcctgggcaacatgatgaaayctcatctctaaaaaaatacaaaaattagctgggtatgtggggggtgcacaggtagtcccagctactcaagaggctgaggtggggggattgcttgagcctggcaggcggaggttgcagtgagattgcaccactgcacaccagcctgggtaacccattgagaacctgtcttaataaataaataaataaataaacaaacaaat

SEQ ID NO: 1024 - DNA, 401 bp, Homo sapiens
catagttgaagttgacattaactagcatgtgccaacgagtgacaaaggaaacaagtgcaaagcaagaaaagttagccattatcatggtccatagataatactctcaaccccggctcttgagtgaagcagtattgtgcagtggttacatttatggacctaatggtcaaactgcatgagttcaaatcccagctttacagctawtggttgcattatcttgggcaagtcatttaacatctctgccttaattgattcacctctratatagagctgataggagtctgaaatagctgctataaggactaaatacattaatatatagatagcattcataacagtgttttgtggactttccgaaggtgctgggccttccagttgccttaaagaatggattggattagggt

SEQ ID NO: 1025 - DNA, 401 bp, Homo sapiens
aaagcaagaaaagttagccattatcatggtccatagataatactctcaaccccggctcttgagtgaagcagtattgtgcagtggttacatttatggacctaatggtcaaactgcatgagttcaaatcccagctttacagctawtggttgcattatcttgggcaagtcatttaacatctctgccttaattgattcacctctratatagagctgataggagtctgaaatagctgctataaggactaaatacattaatatatagatagcattcataacagtgttttgtggactttccgaaggtgctgggccttccagttgccttaaagaatggattggattagggtggaggagatgaaaaaaggcatcacagtacatcaagtgmatggtgccagtgtaagtaga

SEQ ID NO: 1026 - DNA, 401 bp, Homo sapiens
gccttaattgattcacctctratatagagctgataggagtctgaaatagctgctataaggactaaatacattaatatatagatagcattcataacagtgttttgtggactttccgaaggtgctgggccttccagttgccttaaagaatggattggattagggtggaggagatgaaaaaaggcatcacagtacatcaagtgmatggtgccagtgtaagtagaatacaggaataaggaaatgcccagcttgttggggggttagtatgaagacctctaactgggactgaaagttctagcaacagtaaaataccctggcctccaactactaagtaccctgaatactaagatgagtttatttttcattctatagacaatttccatctctttctttcaaaacaaaca

SEQ ID NO: 1027 - DNA, 401 bp, Homo sapiens
gtgtaagtagaatacaggaataaggaaatgcccagcttgttggggggttagtatgaagacctctaactgggactgaaagttctagcaacagtaaaataccctggcctccaactactaagtaccctgaatactaagatgagtttatttttcattctatagacaatttccatctctttctttcaaaacaaacaaatgatgacrctgtatgagtaacagaagatgactgggaacagaaccgtgaacagaattaagcacctgcaatcaaataaaattcacagaaaacttaatttaccacattagtgatatgcataatcgttgttgtrctggtaaccagctcttcaggaaaaaaaaaagaaaattcctgatttgttaaaatactgtcactatggcccactgaaact

SEQ ID NO: 1028 - DNA, 401 bp, Homo sapiens
cctgaatactaagatgagtttatttttcattctatagacaatttccatctctttctttcaaaacaaacaaatgatgacrctgtatgagtaacagaagatgactgggaacagaaccgtgaacagaattaagcacctgcaatcaaataaaattcacagaaaacttaatttaccacattagtgatatgcataatcgttgttgtrctggtaaccagctcttcaggaaaaaaaaaagaaaattcctgatttgttaaaatactgtcactatggcccactgaaactatcaaaatgaggcatataacaggaaattgggaggagagttatacaatcagctcttgctagaaaatgatgatcattgacattacccttatggaaccaatccaaatttgggsgttgttttcttt

SEQ ID NO: 1029 - DNA, 401 bp, Homo sapiens
aatcgttgttgtrctggtaaccagctcttcaggaaaaaaaaaagaaaattcctgatttgttaaaatactgtcactatggcccactgaaactatcaaaatgaggcatataacaggaaattgggaggagagttatacaatcagctcttgctagaaaatgatgatcattgacattacccttatggaaccaatccaaatttgggsgttgttttctttctttctacttttgtgtgtgtgtgtgtgtgtgtgtgtgttctctggtatctgtaaataacatccatatcagtttctccatccattctttgcacatcactggtaatgcctgagatcaaatctgccatgcttttccgggcagatccaggctgggatctcagtatccctgcttccctgaagctgtccaacct

SEQ ID NO: 1030 - DNA, 401 bp, Homo sapiens
gtccaacctcactcccttcattgctctgctgtgattaggaaggagccattccaaggactatggggtgctctgtgggataagcccagtccttcttccatacaggaggaacaggggacgggtgctgacaagaggaaatgcatggagcagagagagggaacaggcagatggactcaaggtccccagactctttcgagtgttgartcagaaggactggagctgtgggggaagagggtgggaacagggtagtggaataacatgcagacagatgggctgaactgaaggtccagaggcactcccagccgtcaaccagcagttcttacaccaggttgatgttagggaacaaccccagctttaaaacttatttataccaaagtgccaaatgactcatttgagacaaggct

SEQ ID NO: 1031 - DNA, 401 bp, Homo sapiens
aagttatgcatttagttgcctcttgttcattagtctggacttagagcaaagtgactacttcaacttcttgtgctcaacatatgccacagttgcttacatgtgataagtccatttgtcacttgataagcctttgctagaatttccttctctccatctccaaccttataatgatcttgaaggcaatgtcggaggctaggtaartcttctttgtgttccccacttgagcataggtgagctgtcatgtcaatttccttacactactgagaagaggggatgtgggtgggcagggacccccagaaacaactttacccctttcacagtttccatcactgcctccaatgtccaccgacgttagaaagtttgggcagaagtggccaggtgcggtggctcacgcctgtaat

SEQ ID NO: 1032 - DNA, 401 bp, Homo sapiens
ccctttcacagtttccatcactgcctccaatgtccaccgacgttagaaagtttgggcagaagtggccaggtgcggtggctcacgcctgtaatcccagcactttggggggccgaggcgggcagatcacaagctcaggagatcgagaccatcctggctaacatggtgaaaacccgtctctactaaaaatacaaaaattagccrggcgtggtgtcaggcgcctgcagtcccagctactagggaggctgaggcagaagaatggcatgaacccaggaggcggagcttgcagtgagccaagatcgcaccactgcactccagcctgggcgacagagcaagactccgtatcaaaaaaaaaaaaaagaaagtttgggcaaaacctagagtttcagggaaagtcatttgag

SEQ ID NO: 1033 - DNA, 401 bp, Homo sapiens
aaaacatgagagaagggagtcaactttgacagagatttcaagagcagatcactgatgaaatgtgataacattcagaaaatagagaagttgacatgggctttgatgaaaacacaatgagttcagtttgaagcattttgaagtcaaggtgattttgtgaaatacaaacgatgctgtccagcaggcatagaatctatctggagycatttgtacaatatacctatgccttttttttttctttctcctactgtagacttagataggaactcacttttgtcttttttctgctaggccaataaatacgttctcagcttagaaaaggggctttttggtttgcctatttctgtttctttttacagaagttaacacatttatttgtgacctattaaaatcatgaagtatta

SEQ ID NO: 1034 - DNA, 401 bp, Homo sapiens
attcttgtgcaaagaaggattccaaagggtttcagaaatactaaacttcttgaaattgaaattgaaattgaaatccttcttggcttctctacctgttacttcctctgcagtgctcagtatagtgtctgctctccctcctttctttttctttttttttgagacagattttcactcttgttgcctaggctggagtgtaatggygcaatcttggctcaccgcaacctctgcctcttgggttcaagcgatactcctgcctcagcctcccaaggagctgggattatagtaccacgcccagctaattttgtcttttcagtagagatggggtttctccatgttggtcaggctggtctccaactcctgacctctggtgatcctccctcctcggcctcccaaagtgctgg

SEQ ID NO: 1035 - DNA, 401 bp, Homo sapiens
tcaaacccctaaagttatccttgaataaatgagccttgcaaattatatttccccaatttgcacttatttctttcttttttttcttttttctttgagacagagtttcactcttattgcccaggttggagtgcaatggagtgatctcagctcactgcaacctccgcctcctgggtttaagcaattctcctgcctcagcctccyragtagctgggattacaggcgctccccccctccccatgcctggctaattttttatatttttagtagacagggttttgccgtgttggccaggctggtctcaaactcctgacctcaagggatctgcccacttcggcctcccaaagtgctgggattacagatgtgagccaccgcacccagcctcagaatttcttactgaataa

SEQ ID NO: 1036 - DNA, 401 bp, Homo sapiens
caaacccctaaagttatccttgaataaatgagccttgcaaattatatttccccaatttgcacttatttctttcttttttttcttttttctttgagacagagtttcactcttattgcccaggttggagtgcaatggagtgatctcagctcactgcaacctccgcctcctgggtttaagcaattctcctgcctcagcctccyragtagctgggattacaggcgctccccccctccccatgcctggctaattttttatatttttagtagacagggttttgccgtgttggccaggctggtctcaaactcctgacctcaagggatctgcccacttcggcctcccaaagtgctgggattacagatgtgagccaccgcacccagcctcagaatttcttactgaataat

SEQ ID NO: 1037 - DNA, 401 bp, Homo sapiens
cccctccccatgcctggctaattttttatatttttagtagacagggttttgccgtgttggccaggctggtctcaaactcctgacctcaagggatctgcccacttcggcctcccaaagtgctgggattacagatgtgagccaccgcacccagcctcagaatttcttactgaataatccttttatagtttgttataactaacwcaaaacagtagtgggagttcttattcagatagctaamaaattccaggcacctcctgtactataagtgtccctcatagcacaaaggggaaagctgccctttaagaatccataaatgcaatgaaactctacttacgccacccaggttgttaggacacaggaatattaatctggagaagcctttgataatagaatatagtcaa

SEQ ID NO: 1038 - DNA, 401 bp, Homo sapiens
tagacagggttttgccgtgttggccaggctggtctcaaactcctgacctcaagggatctgcccacttcggcctcccaaagtgctgggattacagatgtgagccaccgcacccagcctcagaatttcttactgaataatccttttatagtttgttataactaacwcaaaacagtagtgggagttcttattcagatagctaamaaattccaggcacctcctgtactataagtgtccctcatagcacaaaggggaaagctgccctttaagaatccataaatgcaatgaaactctacttacgccacccaggttgttaggacacaggaatattaatctggagaagcctttgataatagaatatagtcaaagttgacattgtgctagaatatttgaattttttattt

SEQ ID NO: 1039 - DNA, 401 bp, Homo sapiens
attgtgctagaatatttgaattttttattttccagaaattattttcactctttgctacatttactgtttgacctcaaaagaatgtaaaagcaagtttttaaatacaccattatttcctcaagaggctacagaattgctggatttttttttttttttggaatggagtcttgctctgccacccaggctggagtgcagtggcaygaccttggcacactgcaacctccacctcctgggttcaagcagttctcttacctcagcctcctgagtagctgagattacaggtgtgtgctcccatgcctggctaatttttgtatttttagtagaggtggggtttcgccatgttggccaggctggtctcaaattcctgacctcaagcaattcacttgccacagcctcccaaa

SEQ ID NO: 1040 - DNA, 401 bp, Homo sapiens
gtacatttttgtcaaatgaacctaattggcaaagcaaaatctcatcttttaaatttctgagtttccactattgataaaaaaaaaaaaaataacgtaaaacagtgttggattttcaaactcaaaagaaagaaaaaaaccacaaaaaacaaaaaaagcagaagttgggtaaaaacgagttctgactaaaagctgcaatactgyctcaaatgtgcccrtgaccccacctattgctcaatttctacaccatgagggtaaagggaaacgaaatgcaacttggattcacttgacttcttaagtcttacagagagagaaactgatcagaaaagatacatttttggaggttggtttttttttttaattcttgcttgtaaggcagggcttggtgactcctggtctcctcc

SEQ ID NO: 1041 - DNA, 401 bp, Homo sapiens
aatgaacctaattggcaaagcaaaatctcatcttttaaatttctgagtttccactattgataaaaaaaaaaaaaataacgtaaaacagtgttggattttcaaactcaaaagaaagaaaaaaaccacaaaaaacaaaaaaagcagaagttgggtaaaaacgagttctgactaaaagctgcaatactgyctcaaatgtgcccrtgaccccacctattgctcaatttctacaccatgagggtaaagggaaacgaaatgcaacttggattcacttgacttcttaagtcttacagagagagaaactgatcagaaaagatacatttttggaggttggtttttttttttaattcttgcttgtaaggcagggcttggtgactcctggtctcctccaatagcctaatttt

SEQ ID NO: 1042 - DNA, 401 bp, Homo sapiens
aattcttgcttgtaaggcagggcttggtgactcctggtctcctccaatagcctaattttcctcccaaaagtaagcttttgattccactagggtgggcaagtatctttgtactctgccatttcagagataagagccaactgattttagaaatccaagagcaaatgaaatgtgcaacattttactcttggattgcttgagacygcatctgtatgcctattccctggagtgcagactgtcttgtgagcatttggtgccactgaactctgaaaatcagggcatgcagcatctgctggggaacacaatctggtttctgtggatcagaagcatttctctacacgttagagtcttaaggatttttaaagagagcaggtctactcaggcaactcgttaccgtccctttc

SEQ ID NO: 1043 - DNA, 401 bp, Homo sapiens
ccttcagtcattagtgacagatctattttaaagggacgaggttgtgcaacaagggtacaaaggcagctcatggttctaattgttgggctccattagaaggggtctttctggagactgtggtttcttagagcaccgcagtctacccctgaatgaaaggcatcctgctggctaattaacttgcagcactttcttctctattgkgccttgattttttgttttgtttggttttaatctcagaccttgtttctagtaggactgatggagtcttccattatttcgccyaaatattttatgaagaacaragtttccaatcactcactcactctgatttcattacttttagcatacttttcgttcttataatctgcaataaagaggaagactattaagattcaagcttg

SEQ ID NO: 1044 - DNA, 401 bp, Homo sapiens
gttgggctccattagaaggggtctttctggagactgtggtttcttagagcaccgcagtctacccctgaatgaaaggcatcctgctggctaattaacttgcagcactttcttctctattgkgccttgattttttgttttgtttggttttaatctcagaccttgtttctagtaggactgatggagtcttccattatttcgccyaaatattttatgaagaacaragtttccaatcactcactcactctgatttcattacttttagcatacttttcgttcttataatctgcaataaagaggaagactattaagattcaagcttgtttgagcaagtacactgccagagcaaaatcagaggaattcatggaagactgggaaggtgcaagtaatctttctcttagaat

SEQ ID NO: 1045 - DNA, 401 bp, Homo sapiens
gtctttctggagactgtggtttcttagagcaccgcagtctacccctgaatgaaaggcatcctgctggctaattaacttgcagcactttcttctctattgkgccttgattttttgttttgtttggttttaatctcagaccttgtttctagtaggactgatggagtcttccattatttcgccyaaatattttatgaagaacaragtttccaatcactcactcactctgatttcattacttttagcatacttttcgttcttataatctgcaataaagaggaagactattaagattcaagcttgtttgagcaagtacactgccagagcaaaatcagaggaattcatggaagactgggaaggtgcaagtaatctttctcttagaattgtgatggtaacatatgaaa

SEQ ID NO: 1046 - DNA, 401 bp, Homo sapiens
cagcttgggcaacatggcaaaaccccatctctacccaaacaaacaaacaaacaaacaaacaaactagccaggcatggtggcaactgcttgtagtctagctacagcttccatgaattgttcagtgatgctctcttaactccatgatctatggaacaggcaggcagaaatggagagacagtgggtggaggggaggagcctcaratggcacagaaatctgtagcatctagatcagagtgacacctcagagtttcgagtaacgacaggcacctggcccatggctgggattgttaccagtggtgaatctgtgcaggtctgcagcaacctcaattcttccctcyttaggataaaaacttcattgaggggcataaagcagaagagactgaagcaagttttagagaggg

SEQ ID NO: 1047 - DNA, 401 bp, Homo sapiens
tccatgatctatggaacaggcaggcagaaatggagagacagtgggtggaggggaggagcctcaratggcacagaaatctgtagcatctagatcagagtgacacctcagagtttcgagtaacgacaggcacctggcccatggctgggattgttaccagtggtgaatctgtgcaggtctgcagcaacctcaattcttccctcyttaggataaaaacttcattgaggggcataaagcagaagagactgaagcaagttttagagagggagtgaaagtttattaaaaagctttagagcaggaatgaaaagaaagtaaaatacacttggaagagggccaagcagacatcttggaggtcaagcacagggatttgaccttctgacttgggggtgtatatgctggcctat

SEQ ID NO: 1048 - DNA, 401 bp, Homo sapiens
gaatgaaaagaaagtaaaatacacttggaagagggccaagcagacatcttggaggtcaagcacagggatttgaccttctgacttgggggtgtatatgctggcctatttccagcacttcacatcccttttcccttgattcttcctttaggatgggctgccgcatgtgtggtggcctgctagtgcttgggaagtgagcatgcrcagtgtgtttactggcgttgtacacatgctcacctgaggcgttcttcgggtgaatgcccccagaaagtcatgtaccagttaaactctgccatttggcctcttagtgcatatgtgtgagccccctgcscaactcctgggaccttatcgggaagctgataatcaccagtttcagatttttcctatttataaaaagactgcct

SEQ ID NO: 1049 - DNA, 401 bp, Homo sapiens
ttcccttgattcttcctttaggatgggctgccgcatgtgtggtggcctgctagtgcttgggaagtgagcatgcrcagtgtgtttactggcgttgtacacatgctcacctgaggcgttcttcgggtgaatgcccccagaaagtcatgtaccagttaaactctgccatttggcctcttagtgcatatgtgtgagccccctgcscaactcctgggaccttatcgggaagctgataatcaccagtttcagatttttcctatttataaaaagactgcctttccctggagctggctgcaaccaattattttagagagacagttaccaaccacctgttcatcacttgatggtggcctgacattcctggttagggcggggggcactgtcctgctctgctcatgtctgcc

SEQ ID NO: 1050 - DNA, 401 bp, Homo sapiens
ctgtcctgctctgctcatgtctgcctacctactgtagcaggaccacaggcagacttttcttaaggagactcccagctttcttcctggtgaaggacccagagtttgtgagcccaggactgcagataatcaaaaatattaaattatggaagctaaatatttaaaataataactcataatggctctccaaatgtctgtaaaagsatttcacttaacaatasctggcaaatattatgtcagtggaaaatacagccaagttttggctcatccaaaatgttgtcatcaccgccactttaatatttaagagattaatgtttcaaggctcttccagaacattgtatttggagtctgattgaaagactcctcggtcctccctcattattctttatgtgtgactttggatg

SEQ ID NO: 1051 - DNA, 401 bp, Homo sapiens
tgtctgcctacctactgtagcaggaccacaggcagacttttcttaaggagactcccagctttcttcctggtgaaggacccagagtttgtgagcccaggactgcagataatcaaaaatattaaattatggaagctaaatatttaaaataataactcataatggctctccaaatgtctgtaaaagsatttcacttaacaatasctggcaaatattatgtcagtggaaaatacagccaagttttggctcatccaaaatgttgtcatcaccgccactttaatatttaagagattaatgtttcaaggctcttccagaacattgtatttggagtctgattgaaagactcctcggtcctccctcattattctttatgtgtgactttggatgctctcaatacacttaaa

SEQ ID NO: 1052 - DNA, 401 bp, Homo sapiens
ttgtattttaacaaggcctccatgcaattctgatgtgccctccagttttagaattgatgctctgtgcaaatgaacaggtactggggcataatgatatgcaggactgttcttgagccaggctttgtattcatgaagtgggtgatagttgattggcattgtttcagtactcagtagctatgaagcattctattggtatcattrgtattaaatatggagcagaagcataactcatctccctcatggccacatgaagaaagatcagtatgttagagctgaaggacacctaaagccccaaacaactgccagagaccaaaatcatttgtctcaagaaatgttaacaccctttttgtgttcaagttttattatttctttactaaaattgcccattcacccctttgttt

SEQ ID NO: 1053 - DNA, 401 bp, Homo sapiens
attatttctttactaaaattgcccattcacccctttgttttatttttcacacctaaaaaagtagccaagtttgaaaaagaaagagtgcttgccaccctttctgtccttaaagtgaaggccttgtctatctcattctgatctctgcccatccatcaccattcagcactcctgttgtgacttcgccccatctccaatcttacrttttattttcttggtacttttggtcatggctgtgttgatggtttcagaagaatacatagtatattaaggggtaacgtttacaaatgttcttgagagaactaatttttcccccttcatctcaaggtgtcactgcttaattattacggttcctaaataatctctatgatgtggttaactatccctaccttgcagaaatcctg

SEQ ID NO: 1054 - DNA, 401 bp, Homo sapiens
cttaattattacggttcctaaataatctctatgatgtggttaactatccctaccttgcagaaatcctggaagatgagacggacctagcatgttgtgtgagcaacatctcttagagataatcaatttgatatcagcacaattattgtggctactattgaaatttctcttagtttcttagattagtactattggaactaatcrtaaataaccaatttacaagaaaatgagtctcattatattatagcacgaagaggatatattcaaggagatacacctttgaatctattatttcratatgcttataaaaattactattttaataaatttcccagtcaatcctattgtgtagaaaaagatgcttcactgcttacatattttaagatgagactgggaacaagcag

SEQ ID NO: 1055 - DNA, 401 bp, Homo sapiens
tgtgtgagcaacatctcttagagataatcaatttgatatcagcacaattattgtggctactattgaaatttctcttagtttcttagattagtactattggaactaatcrtaaataaccaatttacaagaaaatgagtctcattatattatagcacgaagaggatatattcaaggagatacacctttgaatctattatttcratatgcttataaaaattactattttaataaatttcccagtcaatcctattgtgtagaaaaagatgcttcactgcttacatattttaagatgagactgggaacaagcagattaatttggttgtgagactgggagtttatgagcaaaatgttcttctgtgcaaacgaagtagaagcttcatttcccttcccttcagttaacc

SEQ ID NO: 1056 - DNA, 401 bp, Homo sapiens
aaaactagactaaattctgtattgaaaatgtcaagtcaaatatgctatataaccaagaaatatcagtatagaatatcatgtattctacacaaagctacattttcaatataatccccgtaattatttcactcatcaaagaaatgtatccagctgagacataaaaccttagtcaatacattaagaaaaaaagaaaaaaaaaamcatttttttcccagtcatggggaccagattgtgtctattattcatcagggcctagcacaatgttgagcacatgctcaaggtggccaataaatccttgtggaattgagttatatgggagtcaattattcggtcacagcactggattaggaggttgagttcttgatagatttactttcagctgacctgtgtgacatttggta

SEQ ID NO: 1057 - DNA, 401 bp, Homo sapiens
catttggtatttggttttgcaactttgttttcagttttttccatgcaccaatactcctagaattttgcttttgcctcttttcttccctttcatcttttttttttttctgtagaaagcatacatccatatagaagacctctctcaatacattccagatctgagttgcagtgcagcacttagcttagcttgtgaaacactccraagacttgattaatatcatcctatggagagatgtccttaagtaacttagaatggatcctttatttttccagtaaataaactctaaaatatgaggatttccaaggtgaaaagaaagagtacgaacccaagaaatattttaaatgaatcttgttttccgtccctgtgttctgagtaacatctgtattcacccctgcctttcc

SEQ ID NO: 1058 - DNA, 401 bp, Homo sapiens
atatttgtcgttgaattatttcttctttgtttaaaattaaataatgcaagtgatttttttgctttagaaaggaggattacctcttcctagacatccagttgaaaaaccaactggtatagaagggaaatgcatctcaaacagatacaatgacattcttataattgcctcatttgaaatggcagcatttccccgtgctaattrtcatccttcagctaatttggtacattaaaggagattgttattaaaaacaaaattaaatccattgccagcatctttattctctaccagaagaaaaattttaaataaatgcaaatacgccagttttgctcttaatgttgcctgaagttgaaaggatgaactttgacttgaaagataatgagttccccctgttggaggatytg

SEQ ID NO: 1059 - DNA, 401 bp, Homo sapiens
ttrtcatccttcagctaatttggtacattaaaggagattgttattaaaaacaaaattaaatccattgccagcatctttattctctaccagaagaaaaattttaaataaatgcaaatacgccagttttgctcttaatgttgcctgaagttgaaaggatgaactttgacttgaaagataatgagttccccctgttggaggatytgaggtttgggttggataatcccagatgatgttggaatagacagaatttaaggttccttctaaccctgaaattctatggttataaaatctatccttttcttgaaagaagaaatattaaaggtgttttcaaggaaatggtagcataatgaaaaaggaaacacaaaaatgatttttttttccttaataagcagtcacctcac

SEQ ID NO: 1060 - DNA, 401 bp, Homo sapiens
tttttcttcttaattgcttgtttgtttgtaacaaatgcggtggtgtaatcaagtggcttttacaataataaaacacttctctcaattaaactgtactgcaaggaattcaaagatgaacagaagtgttccttcttttaagatgctgatttataagcatccctttaaaatttacttctctttctgatgataaaagtaatacaygtttattgtagaacatttggaaactaccagggactataaataacccatagttgccccaccagagaatattcttaatatttttggcatatttcttccatatatctattcatattcacattcatactaatttgtcatattctaatttaaccctctctttaatgtttataatgtgattatactactttttaacacatgaattg

SEQ ID NO: 1061 - DNA, 401 bp, Homo sapiens
ttgttgttgttgttttgagacagagtttcactcttgttgcccaggctgaagtgcagtggtgtgatctcggctcactgaaacctctgcctcccaggttgaagggattctcctgcctcaccctcccgagcagctgggattacaggcgctcgccaccacgcccagctaatttttatatttttagtagagatggggtttcgccaygttggccaggctggtctcgaaccctgacttcaggtgatccacccgcttcagcctcccaaagtgttgggattacaggagtgagccactgtgcccagcctgtttggttttgtttttgttattgtttgtttgtttggagtatgtctttattagcagtgtgagaacaaactaatacatcagaagttctgattttcatatcagca

SEQ ID NO: 1062 - DNA, 401 bp, Homo sapiens
aaagattcctccaggacttttacaaagacagatgatattaaactgaacaaatagtgctaggtaagaagtaaattgttcaattttttcacagaagccctgtagattttagcaaaaccccccagacacaatgtcaaatttctcagcaggtttcttggttttagctcttccccttaagcagtagttaacagaatattagatgtkagtaaagttatttctttgttattctacctgggttgactaccagagaaaatccctgaacattttacaaattgctcaacagattttcatctaaaactagaaaagattggccagttatggtggctcacgcaggaacattgctttagcccaggagctgaaaaccagcctgggcaatagagtgggacccccatttctaaaaaata

SEQ ID NO: 1063 - DNA, 401 bp, Homo sapiens
tgggttgactaccagagaaaatccctgaacattttacaaattgctcaacagattttcatctaaaactagaaaagattggccagttatggtggctcacgcaggaacattgctttagcccaggagctgaaaaccagcctgggcaatagagtgggacccccatttctaaaaaataatatcttttaaaaaattaactgggcatgkcggtgcgtgcctgtagtctcacctacttgggaaactaaggagggaggattgcttaagcccaggatgtcaagattgcggtgagctatgattgagccactgcactccagcctggaggacagagtaagaccctgtctcaaaataaaataaaataaaattagaaaggataggtgtgtktgggagggagactggttaaycagggt

SEQ ID NO: 1064 - DNA, 401 bp, Homo sapiens
atcttttaaaaaattaactgggcatgkcggtgcgtgcctgtagtctcacctacttgggaaactaaggagggaggattgcttaagcccaggatgtcaagattgcggtgagctatgattgagccactgcactccagcctggaggacagagtaagaccctgtctcaaaataaaataaaataaaattagaaaggataggtgtgtktgggagggagactggttaaycagggtgcatgggattatgtagggcttgtctttcatttgagttcttctctgtctttttaaaatgactgattatatatattaggtcccaatggcttcattatcactattattttaattcataggttaaattttataaacatgaaaaataattgacaagcctagaatctcttttctgtctat

SEQ ID NO: 1065 - DNA, 401 bp, Homo sapiens
ggcatgkcggtgcgtgcctgtagtctcacctacttgggaaactaaggagggaggattgcttaagcccaggatgtcaagattgcggtgagctatgattgagccactgcactccagcctggaggacagagtaagaccctgtctcaaaataaaataaaataaaattagaaaggataggtgtgtktgggagggagactggttaaycagggtgcatgggattatgtagggcttgtctttcatttgagttcttctctgtctttttaaaatgactgattatatatattaggtcccaatggcttcattatcactattattttaattcataggttaaattttataaacatgaaaaataattgacaagcctagaatctcttttctgtctatattagaaattaaattatatt

SEQ ID NO: 1066 - DNA, 401 bp, Homo sapiens
tgcatgggattatgtagggcttgtctttcatttgagttcttctctgtctttttaaaatgactgattatatatattaggtcccaatggcttcattatcactattattttaattcataggttaaattttataaacatgaaaaataattgacaagcctagaatctcttttctgtctatattagaaattaaattatatttagtakttaagcaatacatgcatacatctcatgtaatccttactgtaattaaggatgaaattatgtaacataggaaaagcagatgtaagttctcattctccttttacacataaggaaattaattcagacttttagtaagttgcccagaatcacgcagctagtaagattcagaactaaaaatataatacctgtcttctaattcaaat

SEQ ID NO: 1067 - DNA, 401 bp, Homo sapiens
atctctaaaatgatacctaaaatgataaacaatttaaatttagcataattatcattttttaacttacagattgacatatttctgcaagtgttttcagaggcattggggccacagaagtccaagtcaaggcaatttttggtactaaacagttgacttttctctggtccacatcaaagctgccactgtgcagagaactaacaygtgtaygtgactagtctagggctggaggaacatgcgaggggactgttggaaaggaaaaacttttgctcttcctctaggttcagtaaattagggactgtaaacaataataatgaaagattaataagaggcacacaattttattttattttattttatttacttatttttttgagacagagtttcrctcttgttgcccaagc

SEQ ID NO: 1068 - DNA, 401 bp, Homo sapiens
aaaatgatacctaaaatgataaacaatttaaatttagcataattatcattttttaacttacagattgacatatttctgcaagtgttttcagaggcattggggccacagaagtccaagtcaaggcaatttttggtactaaacagttgacttttctctggtccacatcaaagctgccactgtgcagagaactaacaygtgtaygtgactagtctagggctggaggaacatgcgaggggactgttggaaaggaaaaacttttgctcttcctctaggttcagtaaattagggactgtaaacaataataatgaaagattaataagaggcacacaattttattttattttattttatttacttatttttttgagacagagtttcrctcttgttgcccaagctggggt

SEQ ID NO: 1069 - DNA, 401 bp, Homo sapiens
gtgcagagaactaacaygtgtaygtgactagtctagggctggaggaacatgcgaggggactgttggaaaggaaaaacttttgctcttcctctaggttcagtaaattagggactgtaaacaataataatgaaagattaataagaggcacacaattttattttattttattttatttacttatttttttgagacagagtttcrctcttgttgcccaagctggggtgcaatggcacgatctcggctcaccacaacctccccttcccgggttcaagtgattctcctgtctcagcctaccaagtagctgggattacagacatgcatgaccatgcccggctaattttgtagttttagtagagactgggtttctccatgttggtcagcctagtctcgaactcctgacc

SEQ ID NO: 1070 - DNA, 401 bp, Homo sapiens
cctccccttcccgggttcaagtgattctcctgtctcagcctaccaagtagctgggattacagacatgcatgaccatgcccggctaattttgtagttttagtagagactgggtttctccatgttggtcagcctagtctcgaactcctgacctcaggtcatccactcacctcggcctcccaaagtactgggattacaggtgtragccactgtgcccggccccacaattttattaatatttatatgcaaaagagcttgtagaaaatcagtgaaaatcaaagaagtggttagactagggggtttataaacccttcttaaccaaggaaagagggtttgggcatcaatgagtggcgaattgtggagaagtgactagaaaatgtatgagagaaactaatggaaggtat

SEQ ID NO: 1071 - DNA, 401 bp, Homo sapiens
agaaaaacaaagattaacagttggagcagactctaaagccagtttttgagtccagaaggcagttagttggcaagatttctaaatgttggattcaaggctgggtgcggtagctgacatctataatcccaacattttgggaggctcaagtgggagaattgctcgaggccaggagttcaagataaacccgggcaacacagtgtractccatctctaataaagtcatccaaatgtagttgtatgcacctgtggtaccaactactcaggaggctgaggtggacggattgcttgagcccaggaggtctaggctgcagtgagccatgatcacaccactgccctccagcctgggcgacagagtgagatcctgtcttaaaaataaataaataaataaataaatgttggat

SEQ ID NO: 1072 - DNA, 401 bp, Homo sapiens
gtggacggattgcttgagcccaggaggtctaggctgcagtgagccatgatcacaccactgccctccagcctgggcgacagagtgagatcctgtcttaaaaataaataaataaataaataaatgttggatgaagtgtctttagatggtggattgaggataacaggggcagtctcagtcacgtgcatttcccggagtttgaargaacatgttctggtgagcttcctgagtggtccaaactacggtagtgataattcctttgaagttaggttcagttgtccaacttcagcttccagggctccaagaaaagggcaattgtggttctcagtgatgccaagtcacaagggtgagagaagactggaaacattaattacaagatggcaggattcagtttataaaggggg

SEQ ID NO: 1073 - DNA, 401 bp, Homo sapiens
agcaatgtcagcagaagcctgtactccagagtacctgccaaggttttgttcatgaatctctaatatgctctttctttgctgaagatgaggcatgctggcctacagctgactgcgtgagccttcagaaaagcatcggcataaaacaataattatctgtgaatgacaatgacttaaaatggccatacctaaagatctgatgarwgttcattataagtcaattgataaagaaatttggtygtttctctgacatacaggattttaagataataatgtgataccaagacatctcatgaacagcaagggcaytgacagatttctaggaattttatatgatttctgaaaaatcaaaatcattatatccatacaaatataacccaggaatggttaaatatcttctcttt

SEQ ID NO: 1074 - DNA, 401 bp, Homo sapiens
gcaatgtcagcagaagcctgtactccagagtacctgccaaggttttgttcatgaatctctaatatgctctttctttgctgaagatgaggcatgctggcctacagctgactgcgtgagccttcagaaaagcatcggcataaaacaataattatctgtgaatgacaatgacttaaaatggccatacctaaagatctgatgarwgttcattataagtcaattgataaagaaatttggtygtttctctgacatacaggattttaagataataatgtgataccaagacatctcatgaacagcaagggcaytgacagatttctaggaattttatatgatttctgaaaaatcaaaatcattatatccatacaaatataacccaggaatggttaaatatcttctcttta

SEQ ID NO: 1075 - DNA, 401 bp, Homo sapiens
gccaaggttttgttcatgaatctctaatatgctctttctttgctgaagatgaggcatgctggcctacagctgactgcgtgagccttcagaaaagcatcggcataaaacaataattatctgtgaatgacaatgacttaaaatggccatacctaaagatctgatgarwgttcattataagtcaattgataaagaaatttggtygtttctctgacatacaggattttaagataataatgtgataccaagacatctcatgaacagcaagggcaytgacagatttctaggaattttatatgatttctgaaaaatcaaaatcattatatccatacaaatataacccaggaatggttaaatatcttctctttatttgacagtgcttcccatgcaatttagcatattaa

SEQ ID NO: 1076 - DNA, 401 bp, Homo sapiens
ctgactgcgtgagccttcagaaaagcatcggcataaaacaataattatctgtgaatgacaatgacttaaaatggccatacctaaagatctgatgarwgttcattataagtcaattgataaagaaatttggtygtttctctgacatacaggattttaagataataatgtgataccaagacatctcatgaacagcaagggcaytgacagatttctaggaattttatatgatttctgaaaaatcaaaatcattatatccatacaaatataacccaggaatggttaaatatcttctctttatttgacagtgcttcccatgcaatttagcatattaaataagctcatctctctttttacaaactgagagaacaaatcctttgagagttttccaggggccctctggg

SEQ ID NO: 1077 - DNA, 401 bp, Homo sapiens
gaggccaggagttcaagaccagcctaggcaatatagtgagaccctgtctctctaagaacaaaaaatagattaataaaccaagaaaacttgctcattttaaaagtagttttgcatcaatacactactgtattagtccattcttgcattgctgtaaagaaatacctgagattgggtaatttacaaagaaaagaggttgactcrcagctctgyaggctatacaagaagcatagcagcttctgcttcttgggaggcatcgggaagcctccaatcatggcagaaggtgaaggtggagtaggcgtcttacatggcaggagcaggagcaacagagggtaaggggtcaggtgccacacaattttaaatgaccagatcttacgagaactcggtcactatcatgagtacag

SEQ ID NO: 1078 - DNA, 401 bp, Homo sapiens
agttcaagaccagcctaggcaatatagtgagaccctgtctctctaagaacaaaaaatagattaataaaccaagaaaacttgctcattttaaaagtagttttgcatcaatacactactgtattagtccattcttgcattgctgtaaagaaatacctgagattgggtaatttacaaagaaaagaggttgactcrcagctctgyaggctatacaagaagcatagcagcttctgcttcttgggaggcatcgggaagcctccaatcatggcagaaggtgaaggtggagtaggcgtcttacatggcaggagcaggagcaacagagggtaaggggtcaggtgccacacaattttaaatgaccagatcttacgagaactcggtcactatcatgagtacagtaccaagag

SEQ ID NO: 1079 - DNA, 401 bp, Homo sapiens
cagcgtggccacacaatgtaagattctctctctcttctgttctctctctctctctttcactgacctttacaactttctatatcaactcacatttttgtcctttattttcgtctttcttatttaaatgacctctaaactactctaggataaaagtcactgtcatttttctttaacaaaaacacatctcactctccttgtackctttgcctgcagagttttgtttcttcatcctattattactagtagttcatttacayatatttattagatttcttaacccttagtaacattaactttcagtgaaaatgaagaaataaacaatcataaactgtcagttacatacatgcattctgtgctacattagcacaggtataaatacattctctcataatttctagagg

SEQ ID NO: 1080 - DNA, 401 bp, Homo sapiens
tcactgacctttacaactttctatatcaactcacatttttgtcctttattttcgtctttcttatttaaatgacctctaaactactctaggataaaagtcactgtcatttttctttaacaaaaacacatctcactctccttgtackctttgcctgcagagttttgtttcttcatcctattattactagtagttcatttacayatatttattagatttcttaacccttagtaacattaactttcagtgaaaatgaagaaataaacaatcataaactgtcagttacatacatgcattctgtgctacattagcacaggtataaatacattctctcataatttctagaggcatgtttcctaacagtacaacttctcagtgtggcaaaagagcaggtttattaacag

SEQ ID NO: 1081 - DNA, 401 bp, Homo sapiens
gtgctacattagcacaggtataaatacattctctcataatttctagaggcatgtttcctaacagtacaacttctcagtgtggcaaaagagcaggtttattaacagatccaaatacctttagtctctgccaaattaagaagtcaaaagtagccgggcgcagtggctcacgcctgtaatcccagcacttcgggaggctgagaygggcggatcatgaggtcaggagatggagaccatcctggctaacacaatgaaaccccatctctactaaaaatacaaaaaaaattagctgggcatggtggcgggcgcctgtagtcccagctactcaggaggctgaggcagaagaatggcgtgaaccagggaggcggagcttgcagtaagccgagatggtgccactgcactcc

SEQ ID NO: 1082 - DNA, 401 bp, Homo sapiens
aaaaatacaaaaaaaattagctgggcatggtggcgggcgcctgtagtcccagctactcaggaggctgaggcagaagaatggcgtgaaccagggaggcggagcttgcagtaagccgagatggtgccactgcactccagcctgggctacagagcgagactctgtctcagaaaaaaaaaaaaaaaaaaaaaaaaaaaaggaaayaaacttaaatagataaactttagtaattagtattttggtattttattttctttgaaattatctacctatttcatgaatatccgtcatttaacttagtataactttaagatttcaagtaaccaaaaagatgtcggaaactatttttaagtcactgtactataaaacagttattgttgaaataaagtttgtcagagtaatga

SEQ ID NO: 1083 - DNA, 401 bp, Homo sapiens
catgcttgagcccacttacccaactcctgcgatcttagccggaagctgctgatcagcagtttcaggctcttcctatctgttgggagcctgcctttccctggtgccagctgcaaccaattattattttagagagacagttaaggactgcctgtccatcacctgatggtcgtctgacattcctggttgtggggaaagggaacmctctcctgccctgctcatgtctgactagctacctgctgtaacaaaactagttttatttaccaaagattatcttatatcagataaacttgaaaacatgttggttatatttaaccattaaataatatatttggttatatttctgagtgttttagcaatacttataagygtttttttaagccaacttagaatagaactcattt

SEQ ID NO: 1084 - DNA, 401 bp, Homo sapiens
tcgtctgacattcctggttgtggggaaagggaacmctctcctgccctgctcatgtctgactagctacctgctgtaacaaaactagttttatttaccaaagattatcttatatcagataaacttgaaaacatgttggttatatttaaccattaaataatatatttggttatatttctgagtgttttagcaatacttataagygtttttttaagccaacttagaatagaactcatttattaatttggtaataccatcatgaagtgaggaaatgtcacataggtacaacgtacatacatatatacacacataaacatataaagatttatttattttaaaatttaatttatttaaagacagaaacagatagagattattttaagattttagccacaggtcaggta

SEQ ID NO: 1085 - DNA, 401 bp, Homo sapiens
ccttgagaagacagttttgggtggtagaatattttacagctgaaggaggaagagaaaggatgtaaactttcaagtagtccctttaaaagggagttttcgggcatttttgtctgttacagggttgctgcgtatcattgttgttattatcaattgttattttctgggacaaacagtaaattcttctggtagcactaagctttrtcaagcaggcattttaaaagtggggttggggggatgatttttgatgggtgtgaattttaagttcttgtctaaatctaatttatgcttgttaattttgttaagggagctatccagtctaaccatgatacacttgtttccttctttcaacttgatcctcccataggtagcaatacgatgtttatttagggtgagagctctct

SEQ ID NO: 1086 - DNA, 401 bp, Homo sapiens
agactctgccctcatgatggaaagtcattcccaaaaatagccaaagagaaagcgagctgagaccctcatggtcacaggcagcaaaaatggtgtttgtgaaaatggtatctccagcgttacacaaaagtgaggcacctgcaatcacagacttgtggacctgtgacacttgggaggcaatacggagatgggactttttcagcmctaataagacaatgaggaaggacaacaagtgccttgtatgagctgagacactttatttagacaaattccccagattgctgacatagccaggtgggaaattttgctagtgttttttagggtccttgactgacagcgagcacctccagactcaggcccaaccacctgtgcttcccagtgggcaaaaacacagacagaggtga

SEQ ID NO: 1087 - DNA, 401 bp, Homo sapiens
cgtagctaaaccagctaacacttttcaaccattaacaaagaatggtagagtggaatgtggtggcacatgcctatagtcctaactactcaggaagctgaggtaggaggactccttaagcccaggagtttgaggtcaacctgggcaatatacaatatagtgaggccctgtagagatctataatatgttctgctgtaaacatawgtccacaatataagggccatttttttttttttgagacagagtttcacactgtcgcccgggctggagtgtagtggtgcgatcgctgctcactgcaacctccacctcccaggttcaagcaattctcctgcctcagcctcccgagtagctgggattacaggtacctgccaccatacccagctagtttttttttttttgtattt

SEQ ID NO: 1088 - DNA, 401 bp, Homo sapiens
gttttttgtttgtttgtttgtgtgagacagagtctcactccgtcactcaggctggagtgcagtggggcaatcttgggtcactgcaacctctacctcccaggttcaagcaattctcaggcctcagcttcctgagtagctggactataggcacacaccaccatgcccaaataatttttatattcttagtagagatggagtctyaccatgttggcaacgctagtctcgaactcctgacctcaaacgatttacccacttcagcctcccaaagtgctgggatcacaggtatgagccaccgtgcctggcctatacttgtgtatactttgaattgtttcttttttcttttcctattttattttattttattttatattttattttattttattttttgygacagggtc

SEQ ID NO: 1089 - DNA, 401 bp, Homo sapiens
atggagtctyaccatgttggcaacgctagtctcgaactcctgacctcaaacgatttacccacttcagcctcccaaagtgctgggatcacaggtatgagccaccgtgcctggcctatacttgtgtatactttgaattgtttcttttttcttttcctattttattttattttattttatattttattttattttattttttgygacagggtctggctctgtcacccaggctggagtacagtggtgcaatcatgactcactgcagcctcaagctcctgtgctcaggtgatcagcctcctaggtagctgggactacaggtgaccaccatcacacccagctaatttttgtattttttcatagagatgaggtttcaccatgttgcccaggctggtctcaaattccca

SEQ ID NO: 1090 - DNA, 401 bp, Homo sapiens
accctgaaaaaaatctctggggagaggatcccaaagagacaaaggctaattttctcaccatgcttatagattaggggctttgagaaaatgagggtatgtttttaaagtattttaatagtggactgatctattttacctcctggaccagatgaaatgggaactgttccaattcatggagcaaccagacatacatgttcaaayaattatgaaaaacatacaacagatatttatcaacaaatacatcagtaaacaaacttacatgaccctgcttggccatcactgtttcttttcaacacacacacacacatttacaaatacatatatatgtgtgtgtgtgtgtctgtctgtcgatatatatgtgtatatatatatatatatatatatatatatataaataaaat

SEQ ID NO: 1091 - DNA, 401 bp, Homo sapiens
tttatttgttttagttttaagaatatccaaacaaagacggatacatgtgaaaacttgggacagtaaaattgtgacctttctataaagacaaagaggtaggaatcaagccaaagtgagattaggataatgtcaggtcttagtactctattctgcataatagtttattttaggtaattctctatattggttggcttgctgaarctggtgtgtgtgtgtgtgtgtgtgtatgcgtgtgtgcgtgtgtgtgtgtgtgtgtgtataaaaaatctttttagtcgttcttttttatttgtgcttctcaacatgcttaagcaagtgatatctttccatataaggggcaaaagaatttggggctgtgaggcaggctgacaaagaggaaatatatcctgtctaagcaagca

SEQ ID NO: 1092 - DNA, 401 bp, Homo sapiens
aagattgttccaggatttaaaaatttaagattactttggtttcttggaattatttaatacacactgcaattttccctgaaaaacacatgtaagctaaaatggctctatggaaatgttttatgttttaatgaggttgggaaacagagataaattcacctggtcataatcatatggtaaatattgatgaaaggaacctttttytaaactgcatagctataattctattccagctgattttgtagatttaaaatattttaccctgtttttgtgtctcttaaggagtttctgtttgggttatttgtacagatcaacagataaaaacttatgtcctagaacaaaaacagcacacttaaacacatcttttctttcaggccaaaaagtttgctgtttcaggaccatgg

SEQ ID NO: 1093 - DNA, 401 bp, Homo sapiens
atcagcaaagacaaaaatactgctacttaagtagtagtcactagaaaaataatttattttgttttgttaccttaactgtcagatttaagcacattcctaccaatatttgggtttgggctctgaaacccaaaacttttgaaagctttggaaaattttgtagaagttctttcttctgtcttttttttttttttttttttttgkatactattgccactgggatgcaagcattcataaattatgtttaaatataaaaattaggtcggtaactctctgctcgtggattcctgaaacacaatgtacaaaaacccagaatagatcttcgtggctcactttagagcgtaacagcactgggaggtgatctgacttttcattttacacgcaagaaactgaggctggagaga

SEQ ID NO: 1094 - DNA, 401 bp, Homo sapiens
atggtcaaaggagtttgagagaaaataaataatatatcccttttcggggagtcagagtacaacagcatattcaagatgctgagaaatcctgtgagattaaagataatgaaaagcctgtctttatttcacctaatattttccaaatttatttgaatgtggaacacattgctttgttacctcatgtttacctggttgacatcsaktcccgactagcgcagttaacttttctttttctttttctttgaccaagtctcactctgtcacccaggctggagtgcaatggtgtggtctcggctcactgcaacctctgcctcccggattcaaatgattctcccgccttagtctcctgagcagctgagactacaggctcatgccacacacctggctaatttttgtatttt

SEQ ID NO: 1095 - DNA, 401 bp, Homo sapiens
ggtcaaaggagtttgagagaaaataaataatatatcccttttcggggagtcagagtacaacagcatattcaagatgctgagaaatcctgtgagattaaagataatgaaaagcctgtctttatttcacctaatattttccaaatttatttgaatgtggaacacattgctttgttacctcatgtttacctggttgacatcsaktcccgactagcgcagttaacttttctttttctttttctttgaccaagtctcactctgtcacccaggctggagtgcaatggtgtggtctcggctcactgcaacctctgcctcccggattcaaatgattctcccgccttagtctcctgagcagctgagactacaggctcatgccacacacctggctaatttttgtattttta

SEQ ID NO: 1096 - DNA, 401 bp, Homo sapiens
atgcctccagctgagtgggggctggggcacatatccactgctgtgtgtgttggggttagtgagggcagatgggctcagccccatgggaaccacatggtgtagaatcattacagagaggagagttctgtagcaaaagaagggaaaagtgagctagacaggaaaacaacaacacaatcattgacaactgataagcaaacaacyttagaaaaatcagaaaataggtattagtaacagaattttaaaggaaaattaaaaataggtgttgttgaaaattgtgtttcattgggcagacaaaactaagcaggatgagcaatctgaagaaaataataagctggaaaactgaatataattgcagtatcatttttttaaaagactcattagtacctatgagccattataat

SEQ ID NO: 1097 - DNA, 401 bp, Homo sapiens
ggttgggagagggggaggaaagagagagaggagagaggacgggcttggatgaagaagggaaagaaagagaaagagactgaagcagagaagagccgcagaggaagaaagtgaatgagcactcaagaaggacaaagaggagtagtcgggggtggggtggaggcagggcggggaagggagtgaccgcccctcctggctgcactmttgcctccggagccctctgatcctgtttgcagtgatgctccgagggcaggcacctgctgctctgtaatgattcagcccctttcagccgtcgtcgcgttaacacaacaggatgctgttgctattgtcactactgcctctcctgccgccgctgctgctgccgccgccgccaccgccgctggtcctccttctgcttttacttc

SEQ ID NO: 1098 - DNA, 401 bp, Homo sapiens
ctgaaccagtgttgtaacagcagctctctctagccacatggctcaatctggtaccgggaatgaaaaacttcagcatctgcaagtcatgcttgaatttaagttaaattcaatttatttctaacacattttaaaattaaaacatcacgccatctcttatgttttatagaaatgtgactttcatataccagtgagtattatttkgtgtctttctcttccccatcatagatttcctgtcatctctctgttaccctctacctctcagcgaccccaagctgcctgtwgtctctctctccttcccgttccctaaccacttctccctacttttgtatcttaattggttctttgagattacagcaagtcttaagacatttacggtgctagcctctcactagcttgagacg

SEQ ID NO: 1099 - DNA, 401 bp, Homo sapiens
aagtcatgcttgaatttaagttaaattcaatttatttctaacacattttaaaattaaaacatcacgccatctcttatgttttatagaaatgtgactttcatataccagtgagtattatttkgtgtctttctcttccccatcatagatttcctgtcatctctctgttaccctctacctctcagcgaccccaagctgcctgtwgtctctctctccttcccgttccctaaccacttctccctacttttgtatcttaattggttctttgagattacagcaagtcttaagacatttacggtgctagcctctcactagcttgagacgactgctgtcctgcccagatggcactttcagttagtgagcacttactagtggcagctttattttgtccaggacacagtagg

SEQ ID NO: 1100 - DNA, 401 bp, Homo sapiens
cacagtaggattctgcatgaaggattttcccaaattagttttgtcttctataatcaaatgtttaaatagcttccttggcagttgttaaaaagtacaagatccattagtgaggtacatctttttttttttttttttttttgatgtatgtcatcttagtctggcagattgcagcggcccagtttaataacctgtgatgtgcaragagcccacgctcttaaaaacaatacattcctgtttgcattgmgtaattgcaatagctttagagtggaaagttgacaggaatgaaagcatgactgttctaaatatcaatatagaagggaggagttttctgtagccttttaaaaatgtttctagtttatttttgttgtctctatctcctatcactttttaccatgaggaat

SEQ ID NO: 1101 - DNA, 401 bp, Homo sapiens
tcttctataatcaaatgtttaaatagcttccttggcagttgttaaaaagtacaagatccattagtgaggtacatctttttttttttttttttttttgatgtatgtcatcttagtctggcagattgcagcggcccagtttaataacctgtgatgtgcaragagcccacgctcttaaaaacaatacattcctgtttgcattgmgtaattgcaatagctttagagtggaaagttgacaggaatgaaagcatgactgttctaaatatcaatatagaagggaggagttttctgtagccttttaaaaatgtttctagtttatttttgttgtctctatctcctatcactttttaccatgaggaatatttacttagtagaaaagtacaagatcagaaaatttggttctt

SEQ ID NO: 1102 - DNA, 401 bp, Homo sapiens
tgaggaatatttacttagtagaaaagtacaagatcagaaaatttggttcttaataacttgcatgaaagctcttagggttaaaagagagttgacaatttctctgacgaaatgcctcttgtttttcctctggacagtaatgaagaataaagaataccttttccagacatcatgttcagtgtgaagtagtgcagcatgctgtaraaacacagaaaaacttgatttgtgcttgtaactcccgatcatttcacgaacaccagattcagtggcaaagatttaaagaaaaaaaaagtcttgttttctaggtgcaattagggaaaacctccttcatgcagacgctgctttgtatctttatcaaatccctgaagcatcattaaaggtctgacagacatcactgcctttgc

SEQ ID NO: 1103 - DNA, 401 bp, Homo sapiens
cagacatcactgcctttgctgcctcttcccacctggcaaagtgactgggaaataatacccagatgaaatgacaggctataaaaagcaagtacagatcctgcaaaaagaagcgaaattcaccaggaggacaaggttacttgatcattttaaacttgtctttaattgaaatctgcttgaacaggtttcattgtccagagaaaraaaaaaatgccctttgaaaaacacttcaactaaattctataattttgtcatctgaggaaatcaggaaaacaaagaaacwtctaacacattttcctgatctaagaccatgtcagaaagtatgttgtgaagttttgataaattattttataaagtaaatttttctactaagtgttttagtagattacatattccttatcagt

SEQ ID NO: 1104 - DNA, 401 bp, Homo sapiens
aaaaagcaagtacagatcctgcaaaaagaagcgaaattcaccaggaggacaaggttacttgatcattttaaacttgtctttaattgaaatctgcttgaacaggtttcattgtccagagaaaraaaaaaatgccctttgaaaaacacttcaactaaattctataattttgtcatctgaggaaatcaggaaaacaaagaaacwtctaacacattttcctgatctaagaccatgtcagaaagtatgttgtgaagttttgataaattattttataaagtaaatttttctactaagtgttttagtagattacatattccttatcagtttttttttccccaagccagggcattgatattgtggcatctgcaataaatgggaaagatttactgctgcctaaaagcatc

SEQ ID NO: 1105 - DNA, 401 bp, Homo sapiens
actttttttgggggtggggagaggttgttgtggggagagtagtgtttgaaagggattggtccaggcagctttgtttttagagacttgtaagtggttgtttttgttgttgtttaaaaaggttgtaaccactaattaatggaaagcaaaaaaaaaaaaaaaaaaaaaaaaaagcttacaaagggattgtatttttcaactaaraaagtattgtttagtcacagaaagaactgggacgttccttttcccgtgcatgtttttgacataaactaagctgtcatggcttatatttgaaaatgacattatcatatgtgaaacatgctcttcagtggttttaggactttattctcccgtttccatttttttttctgtctcascatattcagcacattatgcacagagct

SEQ ID NO: 1106 - DNA, 401 bp, Homo sapiens
tacaaagggattgtatttttcaactaaraaagtattgtttagtcacagaaagaactgggacgttccttttcccgtgcatgtttttgacataaactaagctgtcatggcttatatttgaaaatgacattatcatatgtgaaacatgctcttcagtggttttaggactttattctcccgtttccatttttttttctgtctcascatattcagcacattatgcacagagctgtagccttcaaggtcwtagactgttgaaggctaattgattcttctttatcctggagcctgagagagtagaagagagacaatcccagtaattgtgtctgcagcgttgctccccaaaccaatctaccwactaatgttagagttttattttataaatactagaattactccctcac

SEQ ID NO: 1107 - DNA, 401 bp, Homo sapiens
cacagaaagaactgggacgttccttttcccgtgcatgtttttgacataaactaagctgtcatggcttatatttgaaaatgacattatcatatgtgaaacatgctcttcagtggttttaggactttattctcccgtttccatttttttttctgtctcascatattcagcacattatgcacagagctgtagccttcaaggtcwtagactgttgaaggctaattgattcttctttatcctggagcctgagagagtagaagagagacaatcccagtaattgtgtctgcagcgttgctccccaaaccaatctaccwactaatgttagagttttattttataaatactagaattactccctcactgactcttgtcaaattacaacattctttgtctttgttataata

SEQ ID NO: 1108 - DNA, 401 bp, Homo sapiens
tggttttaggactttattctcccgtttccatttttttttctgtctcascatattcagcacattatgcacagagctgtagccttcaaggtcwtagactgttgaaggctaattgattcttctttatcctggagcctgagagagtagaagagagacaatcccagtaattgtgtctgcagcgttgctccccaaaccaatctaccwactaatgttagagttttattttataaatactagaattactccctcactgactcttgtcaaattacaacattctttgtctttgttataataaaaggcaaaatatgacattttaaattgccttaaggtatagtggctatgtcgaattttctaaaatgggtatttctttcataaagtaatatttcatattttcatgatattaa

SEQ ID NO: 1109 - DNA, 401 bp, Homo sapiens
tgtctgggctttaaaatttttcctaccctgactgttgggagattgcaaacttagattatcataaaaagagctgattaattaaattatagccaggaaacagtggtaccatcttgaaagaaaatgttttctggatatgagatcctccctgcttgacaacagattcttggatgcaagaatgtgttggtattttcatcttgggcyaactttgttttgctttgtcctaagtcttattatgggattgtatgacaaaccattgttaccgcagtgacaataagaatcagtaaccatttgcaaaagatcaacatgatgagttggatataccataggatttctttccttctatttgaaagtgccgttcatttaaattctaatgcatccttcttctagttcttggtaactat

SEQ ID NO: 1110 - DNA, 401 bp, Homo sapiens
tagatcatccatactttgttcagcttgcttctgaaaacagcatgggttgcctagggtgagttcttccctcatatatagcagattgctctgtggctcacttcttttcttcataacccattttgttttctcctctctattcttttgtgatacccaactcagacttcttctcccctttccttcctaccttcccaattatgtatwgactcttttttatttttgtaattatgtcattttggctttataggtcagtatttcattgcatcatatcaaaataatttcaactrtctttaatgaaactttattgcattttaatgctgaatggcactttcatatattacaaacatacaaaaaaaatctctagccaatgaccaatataccagtttcttaatgacataattaaa

SEQ ID NO: 1111 - DNA, 401 bp, Homo sapiens
tgctctgtggctcacttcttttcttcataacccattttgttttctcctctctattcttttgtgatacccaactcagacttcttctcccctttccttcctaccttcccaattatgtatwgactcttttttatttttgtaattatgtcattttggctttataggtcagtatttcattgcatcatatcaaaataatttcaactrtctttaatgaaactttattgcattttaatgctgaatggcactttcatatattacaaacatacaaaaaaaatctctagccaatgaccaatataccagtttcttaatgacataattaaatcaaatttttaccttcttcttgatcttttcctcttttttttctttagtgtgcttgattccagtttttctgtttttggacatca

SEQ ID NO: 1112 - DNA, 401 bp, Homo sapiens
cctgagaaccaggaatataacttgtccacagagtccattgaacgttctactacagcataaactacattccgtctacttttatgctcatgtttctacttttattacttttgctctacatcaatgctttgtttttcttctattatttcctctttggtttttttttgtttgtttgtttgtttgtttgtttttcattcagtgaaygtacgctaagtgcctactctgtgccagactctgttctagaccggttatatgacagtggaaaacagtagagtgcctgccctcagggagcttatgttctagtggattttaagaatctaattgcataatgcaatttgagatatttcttgctttcttatacatataccctcttcattcagcatttcttcttctttactgtcatg

SEQ ID NO: 1113 - DNA, 401 bp, Homo sapiens
acctttataatattgatatgtataagacacccctccggaggctggacatctgtctcccaacaatataatatatgagaaaatgttttaatgatcaacgttatcccaactgaaatgcgttacatacttagaaagaaattagttccttagtgcttaaagtattcaagcagtgacactgttgagggagatttatgttcctagcarattattaactatatttacttctgaagtctcttacaactctggttctctcagtttattgtctcagggtgttagctttccagtgggtaracttgactttcaatcctacttgtccctcttcatggccttgagcaagttagaccatcatgttaaatctgtttcctcatttaaatgtgataataataataatatacatgtcttga

SEQ ID NO: 1114 - DNA, 401 bp, Homo sapiens
atgatcaacgttatcccaactgaaatgcgttacatacttagaaagaaattagttccttagtgcttaaagtattcaagcagtgacactgttgagggagatttatgttcctagcarattattaactatatttacttctgaagtctcttacaactctggttctctcagtttattgtctcagggtgttagctttccagtgggtaracttgactttcaatcctacttgtccctcttcatggccttgagcaagttagaccatcatgttaaatctgtttcctcatttaaatgtgataataataataatatacatgtcttgaggctgttaggagattaaatgaggttttggaaaactccaagtcctaggcctgagacataaaaaatatgaaaccagcaccaattttgtc

SEQ ID NO: 1115 - DNA, 401 bp, Homo sapiens
ttagaccatcatgttaaatctgtttcctcatttaaatgtgataataataataatatacatgtcttgaggctgttaggagattaaatgaggttttggaaaactccaagtcctaggcctgagacataaaaaatatgaaaccagcaccaattttgtccctcattctattttaactccctgcctcactttgttctttttctcctytgatcttgacagtggtttggtaacaatgcctggagaatacattttggggttttaggggaaccttatgaaaaactttgaaggaagtgaagagttgatgatacatcatgctaaagtaggaattatgctagaaactcgagatcaaataccagctctacctcttgcatgctgtgtgactttgaggaaatcacttcacttgagat

SEQ ID NO: 1116 - DNA, 401 bp, Homo sapiens
gggtataagttttctgactgtacaatggaaataagctgatggacccaataaaacttggtgaaataaaatggaaagcttcctcaggtaaaatattttaaatttttcatcagaaacatgataggacaagacttgatttactgtgattttcagtgataggcacttagtgtttgagttgcatttcatgaggtggttgtctcccarccaaaggagaaattcatgaactctctttgaagccagagttagcacagaatttaatatgcatgtaattatcaaatgtaaaaatcttcataatttattttagtttaaaagttattaatttaaaattaaaccaaatgtacatatatgcatatgcatttggaagaaagatgagagcaacactgaagacaatgatagttgccatt

SEQ ID NO: 1117 - DNA, 401 bp, Homo sapiens
ctagtgactactgtcattttaaatgggatttattgaatataggatcttcacaatgttgaatactgtgatgtctttaggacatagttgggttatgttataactttgttgacccctgttatttcgttaggacatactgagttgtattagggattctagctcttttactaaataacccagacctacgtatgttctgattgtatkttgggttattacataatcaaaattagcattacagagctttaagccaccttagagacactttgaaccaaatctcttattttatcacagagagacaagcccaaagatgttaaccttcttgccagagaccacatagagccagaaaatgttgatattttcatctcttctaggctttcagctaccaggtcactttgcaaccagtg

SEQ ID NO: 1118 - DNA, 401 bp, Homo sapiens
tttagccaactagaactcgaccctgaatattattttttctcttccatgtttttgctcattctattttttctactataaatgtgctcttcaaacagtctctcctctcccaaattctacttaggcctcaagactcacctctccaaattagatgatgggacccctcttcttgaagacctcctccaaccccccataacctattgsttgtgctttatcacatttagatttgtgtgttcttatttggatgcttgcttattgctcatagtagactgaccatttcctaaggcccagagttatagctaactcatttttatgacctgtatagtaccaaacagtgtacaggttgagcatcccaaatatgaaaatttgaaatctgaaatgctccaaaaatccaaaactttttg

SEQ ID NO: 1119 - DNA, 401 bp, Homo sapiens
ctgtatagtaccaaacagtgtacaggttgagcatcccaaatatgaaaatttgaaatctgaaatgctccaaaaatccaaaactttttgagcatcaccatgatgttcaatggaaatgctcgttggaacattttagattttggattttcagtttggagatgctcagtggtaactataatgcaaacattccaaaatccaaaacamttctggccctaagccttttggataagggatactcaacctatattttatatgaagtaggtatctcattcgtatatttatggaataaaagttacactgagggtaacttgcttatgggagtggaagaggaagaaaataatctgaaaccgggtcttaaatcactgacattttaattttgaagaattcaatatagagtttagtca

SEQ ID NO: 1120 - DNA, 401 bp, Homo sapiens
ggctttaagtcccagccctgtctccggctgtgtgacagcatgcacactatgaactatctgtgccccgattttctcatctgtgaaatggtggcaataactatactttcctcaggggctttttgtgaggatcaaatgagttggtgttcataaagtgtttggaatagtctctggctcatagcgctatataagcatgagctgtcrttactaggcagttttaacaattaaagtgcatttccttagatttcaagtttgatagcttgtgattacaataacaggcttcaggaaagggccaggaattccaagggacctattgacacagctatggatgtgctactatttattttggtttggtttgttcatgtggtttttcctctgtgtgatttatgtgttaccatcatacc

SEQ ID NO: 1121 - DNA, 401 bp, Homo sapiens
attccaagggacctattgacacagctatggatgtgctactatttattttggtttggtttgttcatgtggtttttcctctgtgtgatttatgtgttaccatcatacctgcattgttctcaggatttaggagaacagaaaaggataatcatcaatctacctgtcagtcagaaatagagcgacatggatggtttgaataaaaaygctgccctctctggcaaaatgccatctgttgacattgacatggacaatcatatatgtgtatatctgaatttattgctgtaacttcttattctgtcataaaatggtggacaaattcacaaggagaaaagtaacttatcttagttgttgaagaactgttgcaaaggctttgaattctgcaatgctatcattttaccaagaca

SEQ ID NO: 1122 - DNA, 401 bp, Homo sapiens
ggctggtctaaaaaacaggaatgccacttcatttagggctttttttttttttcaatatcccatgctgcttcttataaattagataattctttaatggtggaagactttattttttctgttgttctatattctttattgagtgcctgctcaatagagaagagtttacctctaaaaggagaacaaacaaaagaataataaacmagaaatcatatactatcttagcaggcrtatggggaaaataagtgtgaggagatcagagtactggtggaggagcatagttattttaaatagattaaaaggtacaaacatacagtctgatagaagaaataacacctagtgtttgatagattagtagggtgaccatcgtttctaagagtctattgcatgtttcaaaacagtta

SEQ ID NO: 1123 - DNA, 401 bp, Homo sapiens
ttcatttagggctttttttttttttcaatatcccatgctgcttcttataaattagataattctttaatggtggaagactttattttttctgttgttctatattctttattgagtgcctgctcaatagagaagagtttacctctaaaaggagaacaaacaaaagaataataaacmagaaatcatatactatcttagcaggcrtatggggaaaataagtgtgaggagatcagagtactggtggaggagcatagttattttaaatagattaaaaggtacaaacatacagtctgatagaagaaataacacctagtgtttgatagattagtagggtgaccatcgtttctaagagtctattgcatgtttcaaaacagttataagagaataatttgaatgtcctagca

SEQ ID NO: 1124 - DNA, 401 bp, Homo sapiens
tctttgaaaaagtaacagctgatgaaaggcttgaatgaattaatggagttaaccatatggccatatggaagaatgttccagactctgggaaaaggccttactgcccaggcagaaggccagtgtagtcaacttaagccaatggcttaagtgtagcatgggaggcaggaggtattaaatgagatcagagaggtgatgaaggcytgatcagggaagcatgccattcattgtaagaatgatggcttttccaccgaaagagatgaggaattattgcagagttttgagtgaccatgggacttgatgccttaggttttaatgggatcactgcctgctgtgttgagaatagcttgtggagaaggatcccaagatcccggtggaaatagtcggaccactgaggagattgt

SEQ ID NO: 1125 - DNA, 401 bp, Homo sapiens
aaggctgatttcagtctaagtagttgaaaggatacggttatcaccaactgagatggagatgatctaaagatcattttgctcagtctcccaatgcataggtgccaaataaatcaaggttcttatcaaaattagaactgtggacattaccttctcataaaaataaagcgagatatgcctgagagcctcctgtaaatcaatacrgctttatgtgtgactagagatccttataaatacaaaagaaaagttgcagtgaaattgaggatgtctgcctagactactcggtaacactatccagaacccacaacacgtgatgatggaatgaagtcccagggggatgtagaataggcttccaacaaaccactttattcctattttatggtttctttttaattcatcttgtt

SEQ ID NO: 1126 - DNA, 401 bp, Homo sapiens
cagctcactttcagtcatcttttaaactttatttcagaagtctactcatcttagaaatgtgcactttatccctaaggtgagctaagtactttcctctctttcctctaggctttgacagtatccagtattttccacccgtttcccatgtactctgctgacatgcatgtattcctcaaggtcaagcatttcttttatccatgwacagatgcttcacatagcaccatgtatactataagctctaagactttgaagtacttgcatgtcccaggtagaggtttttctcctttctctattaagctgtcaattttctatatttatgatgaaaatacacagcaaaagtagtgtaaatgcttattttacttctcaaattactcgtcaagttgccaaggtgccaactattt

SEQ ID NO: 1127 - DNA, 401 bp, Homo sapiens
ctacttcactttctggaaagtaaaaagcagcaaaaaggaggttatcaagagaggagaagcaggaaaagttctagacagtctacttcatttttctcatattctagtactctagacagggtgaaggctcctgttgcagaagtgatggtcacatattcctgcaaataccaagtactcagttcagcccgtgcctgcagtctcttwacatccctgtcctcctctgcttctcaaattttacctactatgcaaagtcttgatcaggttccactcttctttagagacatttcctatactctgtggtcatcattaaactttcctccttagtctctattccagcagctcgaatcatctttaatactcatgtgtgtatttaaacatccatcctaccacataggtgtttgatt

SEQ ID NO: 1128 - DNA, 401 bp, Homo sapiens
atcattaaactttcctccttagtctctattccagcagctcgaatcatctttaatactcatgtgtgtatttaaacatccatcctaccacataggtgtttgattcagtcatgtgtgttttatattatgaattaggttttaagtctcatctttggttttatttacctcctcatacctagaaaaacagattaagcacttgttctytacaaggccctgggttcagagtagtagaattgagagagacagaaagagctagtttctgtcttccaggagcttggtttcatcaaagacataaaagccttgccattaactggagtataaggtagtatatgagatgtatgaagaaaaaatcctttagtttgaggtgaaaaaaaaaaaccaaaaaggaataaggctaagaagga

SEQ ID NO: 1129 - DNA, 401 bp, Homo sapiens
gtagatttatgacaggaagtgacttgtgctccaatttccagaaaacattcattacttcttcctgatgaagctgctcagttaaataatattaattgttcttcccctgatgttatacaaaaattaaaattgatagaatacagaacttaaaagacatttttactttactttttgacattattcattgtttgttgctgatgaatkaaacctcttttcgagtgtgtgttccctttaataggcactggtaatttatgtactaagatttatttctgtatggaaattacaagtgaaatttcatattgaatttatatttagcctgttctagtacatagtctctgcatagtatatccatggcatcctacttaatattacagattcttttatattagtgctgctacatgtgt

SEQ ID NO: 1130 - DNA, 401 bp, Homo sapiens
taactgaagtgaaaaacccttctggaaactgtatatatgaaaagattccatttagatccattgaattttgcctttcattttcaaacttgcaaatagaagcagcattttaatatttttcaagagggggaaaaaaaagagcgtggttccctggccctattgtatcacttccattttgtctggaactgatttcatgcaggagakgcactggaatcagcatgcaaattctatgtggctgttgttcagtctgtttttgattcatcgtggtaaaatatgcataccatgaaatttgctgtcttagccattgttaggcgtacagtttggtagtgtcagatgtgttcacattgttgtgagaaagagctccagactttgtcatcttgcaaacatgaaactctgtacccatt

SEQ ID NO: 1131 - DNA, 401 bp, Homo sapiens
catttcatcgctgtacgaacatcatagagtgacttaacacaagccttgatggtatagccaactacacacctaggctaatcgatagaatcttttgctcctaggctacaaactgtgcaagtatgttactgtactaagtagtataggcaattgtaacacaatcgtaagtatttatatatgtaaacatatctaaacagagaaaargtacagtaaaaatacagtattataatcttatgggaccactgtcrtagatgcagtttcctgttgaccaaaatgtccttatatggcacgtgatggtatatgccatattttgtttawctcttcttgcatcagtgaacacttgggttacttccacctcttaaccggttaataatactgatatgaacatgggtataacattctaa

SEQ ID NO: 1132 - DNA, 401 bp, Homo sapiens
cttgatggtatagccaactacacacctaggctaatcgatagaatcttttgctcctaggctacaaactgtgcaagtatgttactgtactaagtagtataggcaattgtaacacaatcgtaagtatttatatatgtaaacatatctaaacagagaaaargtacagtaaaaatacagtattataatcttatgggaccactgtcrtagatgcagtttcctgttgaccaaaatgtccttatatggcacgtgatggtatatgccatattttgtttawctcttcttgcatcagtgaacacttgggttacttccacctcttaaccggttaataatactgatatgaacatgggtataacattctaattawgttttgttcatctgtggtgggtgtgaaagttaaaccaatg

SEQ ID NO: 1133 - DNA, 401 bp, Homo sapiens
caagtatgttactgtactaagtagtataggcaattgtaacacaatcgtaagtatttatatatgtaaacatatctaaacagagaaaargtacagtaaaaatacagtattataatcttatgggaccactgtcrtagatgcagtttcctgttgaccaaaatgtccttatatggcacgtgatggtatatgccatattttgtttawctcttcttgcatcagtgaacacttgggttacttccacctcttaaccggttaataatactgatatgaacatgggtataacattctaattawgttttgttcatctgtggtgggtgtgaaagttaaaccaatggaacctttttttagtgaatttagtcaaatttctgaaaamcaagaattcctatggaaacatactgataaac

SEQ ID NO: 1134 - DNA, 401 bp, Homo sapiens
cagtaaaaatacagtattataatcttatgggaccactgtcrtagatgcagtttcctgttgaccaaaatgtccttatatggcacgtgatggtatatgccatattttgtttawctcttcttgcatcagtgaacacttgggttacttccacctcttaaccggttaataatactgatatgaacatgggtataacattctaattawgttttgttcatctgtggtgggtgtgaaagttaaaccaatggaacctttttttagtgaatttagtcaaatttctgaaaamcaagaattcctatggaaacatactgataaacatacttttcttattatatattaaaaatgcttgtagggaaaacccagcttctaatagtactctgggtttgtgaagatgcagtaagtgcttg

SEQ ID NO: 1135 - DNA, 401 bp, Homo sapiens
gcacgtgatggtatatgccatattttgtttawctcttcttgcatcagtgaacacttgggttacttccacctcttaaccggttaataatactgatatgaacatgggtataacattctaattawgttttgttcatctgtggtgggtgtgaaagttaaaccaatggaacctttttttagtgaatttagtcaaatttctgaaaamcaagaattcctatggaaacatactgataaacatacttttcttattatatattaaaaatgcttgtagggaaaacccagcttctaatagtactctgggtttgtgaagatgcagtaagtgcttgctaragagatgtttttaatctagagagctagagcagagacttagagttcacttgtttcttctctttttttcaatcattt

SEQ ID NO: 1136 - DNA, 401 bp, Homo sapiens
ttgttcatctgtggtgggtgtgaaagttaaaccaatggaacctttttttagtgaatttagtcaaatttctgaaaamcaagaattcctatggaaacatactgataaacatacttttcttattatatattaaaaatgcttgtagggaaaacccagcttctaatagtactctgggtttgtgaagatgcagtaagtgcttgctaragagatgtttttaatctagagagctagagcagagacttagagttcacttgtttcttctctttttttcaatcatttataagatctctcatcttaactcattaaaactggctgattgactttgattactgacacacccaaactatttcaaaccagttagttcaaaaatgcagttgcctctttgaattatttataaaaaggat

SEQ ID NO: 1137 - DNA, 401 bp, Homo sapiens
agagctagagcagagacttagagttcacttgtttcttctctttttttcaatcatttataagatctctcatcttaactcattaaaactggctgattgactttgattactgacacacccaaactatttcaaaccagttagttcaaaaatgcagttgcctctttgaattatttataaaaaggatctcattacatttttccatarataacgatgatggcaaaggggaagaagggatcattatgccactcctttaaaatgcgggcttctggcctggcacggtgactcacacctgtaatctcagcactttgggaggccgaggcaagcggatcacctgagggcaggagttggagaccagcctggccaaaatggtggaaccscatctctgctaaagayacaaaaattag

SEQ ID NO: 1138 - DNA, 401 bp, Homo sapiens
aaaaggatctcattacatttttccatarataacgatgatggcaaaggggaagaagggatcattatgccactcctttaaaatgcgggcttctggcctggcacggtgactcacacctgtaatctcagcactttgggaggccgaggcaagcggatcacctgagggcaggagttggagaccagcctggccaaaatggtggaaccscatctctgctaaagayacaaaaattagccaggtgtaatggtgggtgcctgtagtcccagctacttgagaggctgaggcaggagaatcacttgaacctgggaggtrgaggttgtagtgagccgagatctcatgactgcactccagccagggcgacagagtgagactccatctcaaaaaaaaaaaaaagtgacatgctggtt

SEQ ID NO: 1139 - DNA, 401 bp, Homo sapiens
atttttccatarataacgatgatggcaaaggggaagaagggatcattatgccactcctttaaaatgcgggcttctggcctggcacggtgactcacacctgtaatctcagcactttgggaggccgaggcaagcggatcacctgagggcaggagttggagaccagcctggccaaaatggtggaaccscatctctgctaaagayacaaaaattagccaggtgtaatggtgggtgcctgtagtcccagctacttgagaggctgaggcaggagaatcacttgaacctgggaggtrgaggttgtagtgagccgagatctcatgactgcactccagccagggcgacagagtgagactccatctcaaaaaaaaaaaaaagtgacatgctggttaaaggtccctgtccat

SEQ ID NO: 1140 - DNA, 401 bp, Homo sapiens
actcacacctgtaatctcagcactttgggaggccgaggcaagcggatcacctgagggcaggagttggagaccagcctggccaaaatggtggaaccscatctctgctaaagayacaaaaattagccaggtgtaatggtgggtgcctgtagtcccagctacttgagaggctgaggcaggagaatcacttgaacctgggaggtrgaggttgtagtgagccgagatctcatgactgcactccagccagggcgacagagtgagactccatctcaaaaaaaaaaaaaagtgacatgctggttaaaggtccctgtccatatcccccttttgcaactatttaatccccagcaaagtcctagccaggatttcctggtaagagtttttctgctctgcgttgtcaacagact

SEQ ID NO: 1141 - DNA, 401 bp, Homo sapiens
tgagttactagtttcaccacacagctgtctcacccagtatcttggaactgtttcttgcttcatgtgtgtgaaaaatatagtaaatttcctggtcatattttagcataattaattataccaactattaatttaatattttgtttgatttttagtttccagggtaaaacattaattttctctttaatttccattctataagawtcctattgttttcagcaaataggagtttccttctctgtaagcattgctgactcaagactatataatgttagaaatagaaaaaagatragaacatgttagtatcaatagcctttattattataatcggtatgggcctaacttctgctagcaacattaaaaatcttttcttttactctatcatttagtaacggattttcttt

SEQ ID NO: 1142 - DNA, 401 bp, Homo sapiens
cctggtcatattttagcataattaattataccaactattaatttaatattttgtttgatttttagtttccagggtaaaacattaattttctctttaatttccattctataagawtcctattgttttcagcaaataggagtttccttctctgtaagcattgctgactcaagactatataatgttagaaatagaaaaaagatragaacatgttagtatcaatagcctttattattataatcggtatgggcctaacttctgctagcaacattaaaaatcttttcttttactctatcatttagtaacggattttcttttggttgtgtcgaatagaattgtttccttgatgttccttgatagagagtgttctctttaatataggaatacagtaaagaaagcatcca

SEQ ID NO: 1143 - DNA, 401 bp, Homo sapiens
atagagagtgttctctttaatataggaatacagtaaagaaagcatccacagtttgtgaggcagagtttagtgctgatgtgtacagaaactcaagtgatatttagacaactgagtccttactgggaatcacttaagccttaaaacatctctgccattatgctgcttattttacattgttctggatagatgctcattatccasttctcattcatgatgagcatgggattgataagggagctgacatgaaaattatggagaaaaaatgcaaatagcaaaagatagaataaagcatgtatacctcatgatcattttccccattgatattgatttggactcactcttgatgtatcaggtgtgttcaatctttggcaaacatttagggttttcgtttttgctgaggt

SEQ ID NO: 1144 - DNA, 401 bp, Homo sapiens
gatagaataaagcatgtatacctcatgatcattttccccattgatattgatttggactcactcttgatgtatcaggtgtgttcaatctttggcaaacatttagggttttcgtttttgctgaggtccacttgaaccctggagcccaaaagaagtaaccaaaaatttctatagcttagtaaattccatgttctagaacttttmatgtggacctcagaaaaaggaaataaccaagagtgccgaaagctacatgtactttgaattgttcagcatgtataaaacccaatggctaaccgtgtctagaaagaaggagataagtaaagtaagattggagcctggcgtttggagttcagcaacttttctctgttgtgcgctgacatttaagttaatagagtgatttctgg

SEQ ID NO: 1145 - DNA, 401 bp, Homo sapiens
tggagcctggcgtttggagttcagcaacttttctctgttgtgcgctgacatttaagttaatagagtgatttctggtggatttctttgaaacaagacagttcatctgagatttggttaaaaaatatttcattactttgaggaagtgattagggttggtcttatttagttggggctttcaaaattgatagttttgcctgatgrtatatgctaaaacattgaattgtgagtttcctagccagactggaccctaagcccatcatttggaaatagtctttcttatttttgttattcttgtatttattaaagaacattggactagtgaaaattacaaaagaaaggaaaatgacacaatacactacattctgttgtatcccatttctatctcakggaattatgtgtgt

SEQ ID NO: 1146 - DNA, 401 bp, Homo sapiens
agttttgcctgatgrtatatgctaaaacattgaattgtgagtttcctagccagactggaccctaagcccatcatttggaaatagtctttcttatttttgttattcttgtatttattaaagaacattggactagtgaaaattacaaaagaaaggaaaatgacacaatacactacattctgttgtatcccatttctatctcakggaattatgtgtgtttaccaaactgatgtctagatgaacattcaatttcgtatcttgccatttaaaatttaacatcatgtgcatttttatgtcattaaatgtccaaacacctggaatttttacgtttgatttgttattgctaaaaagtacttctcttgatttttaggggttttcacttttaattaaaacatattcttgaa

SEQ ID NO: 1147 - DNA, 401 bp, Homo sapiens
tcttcttcattgagttttccaggcctctcttccttctgcacaggctccaaagagaatggctgactataagggttattagtgatattttgggagttattccgttcttatccactctcccaccaacacacacactctcacacctcctcccatcaaagcttgggatctctgggaacagggaaacatatcaagatattagaagaygtcaatgttatatatgcagaaatggtgaaaaatcaatgaatttagtaagttaaatttgtttgggtagcattttaaaaatatttaagtactttgacatatgttaccccctaatacacagagggtgctcagacagcatttgctacaggagtgaaccctggccaaagctgttttaaccaagggacagtggargcccagagagg

SEQ ID NO: 1148 - DNA, 401 bp, Homo sapiens
atattagaagaygtcaatgttatatatgcagaaatggtgaaaaatcaatgaatttagtaagttaaatttgtttgggtagcattttaaaaatatttaagtactttgacatatgttaccccctaatacacagagggtgctcagacagcatttgctacaggagtgaaccctggccaaagctgttttaaccaagggacagtggargcccagagaggttcgttggtttgcttaaaatcacacatccatgggtaagcaaggtgatggataatcagctcaattgagtcagtttacattgtatacacataacaaagcatcatgttgtgccctgtaaatgtatagaattatgatttgtcagttaaaaataatattaataaagtaaataaaatcacacatctcacattgag

SEQ ID NO: 1149 - DNA, 401 bp, Homo sapiens
tccatgggtaagcaaggtgatggataatcagctcaattgagtcagtttacattgtatacacataacaaagcatcatgttgtgccctgtaaatgtatagaattatgatttgtcagttaaaaataatattaataaagtaaataaaatcacacatctcacattgagaggagggcagcctagacccagatttctgttagccccargaattgaggcatatatgggagactagcagacaacacacataggaaacttttgccacttaattattattctttttctcaagaccactatattcatttgggtttgttcttatgcttttttttttttttagcaaattaaaaaaaaattatccttgaatgattctaggttagctttttgactaatggatgttggaaggagctca

SEQ ID NO: 1150 - DNA, 401 bp, Homo sapiens
ctaatggatgttggaaggagctcagtgacaaaggccagggattattttgcttttcctcacctcttcctttgttcctcctcatcatattacaaccttctgcttcaggattccttctgctttttagcaggattgacatgctgggccttacccggaaaggcaaaggctgatttgattagggaggtctttgttccaggtatctcrcatcagagagccttcataacaaatgagaggartggattagaagtttcctggggataattttttgtctaccctttaagggaaatcttgccttcattaattacatctcaaatggaatatgtggaatatagacattttcataatcaacaaggtgattttcattttaaaatgcttaaaaaatgttaagcagcatgtatgcacgc

SEQ ID NO: 1151 - DNA, 401 bp, Homo sapiens
ggccagggattattttgcttttcctcacctcttcctttgttcctcctcatcatattacaaccttctgcttcaggattccttctgctttttagcaggattgacatgctgggccttacccggaaaggcaaaggctgatttgattagggaggtctttgttccaggtatctcrcatcagagagccttcataacaaatgagaggartggattagaagtttcctggggataattttttgtctaccctttaagggaaatcttgccttcattaattacatctcaaatggaatatgtggaatatagacattttcataatcaacaaggtgattttcattttaaaatgcttaaaaaatgttaagcagcatgtatgcacgcacacacatgcaaccaatttcttscaccttttt

SEQ ID NO: 1152 - DNA, 401 bp, Homo sapiens
atgagaggartggattagaagtttcctggggataattttttgtctaccctttaagggaaatcttgccttcattaattacatctcaaatggaatatgtggaatatagacattttcataatcaacaaggtgattttcattttaaaatgcttaaaaaatgttaagcagcatgtatgcacgcacacacatgcaaccaatttcttscacctttttcttgttttaattcttaaaatatgaatttttaaatataaggaaaatcctaaaagcagaaactaataaatactaataaaatgttaattacattgattaaatcattagtattttaagatgggcccctgaaatgtctccataaataagcttaatgtgctttcatttaaacaacaattcagttagtaaattcaata

SEQ ID NO: 1153 - DNA, 401 bp, Homo sapiens
aaacatatttatgtgattagaaaatcattatatccactttaagtgaaaagaaaaagtcttcatttttgtgttacttttccaaacctccttttggcactgaattgtactttatgggggtgtcttgtcatttttttctaaattaactacacctctgcttgcctggaaactagagccattctgacttctattccgatatgtgtktttcatctcctactttttttttttttgagacagtcttgctctgtcgcccaggctggagtgcagtggcacaatctcggctcactgcaacctccacctcccgggttccagcgattctcctgcctcagcctcccaagtagctgggactacaggcacgtgccaccacgccccactaatttttgtattttttaatagagatgggg

SEQ ID NO: 1154 - DNA, 401 bp, Homo sapiens
ggccaggctggtctcgaactcctgaccttgtgatccaccctccttggcctcccaaagtgctgggattacaggtgtgagccaccatgcctggccttcatcttctactttttttatttttaaatattttttattcactattgctgacatcactctcctacctactcggtattctttcattatgagaatctcccacatgaaaamtagtggcacctctggaactcccaaattctagtttagacagattaatccacatttatgttactatttataacagcacaactctgtaaataaatccaaatgtccatgatttattggttacatgttatgatattctgtagaatggatattattgtagccaaaaaattaatttacataggtacacagatgatgacatggtaagc

SEQ ID NO: 1155 - DNA, 401 bp, Homo sapiens
catatctttcaaatggtttggtgtcacaccacaaagcgagttattttaaagccattggaggattctagcaactgagcaaataccgctgatctagtcaatatcaattgataatgtattatatgaaggaaagtaaaatctctttcaaaactttatacatgtttcaattcagttaattatgtaataatagaaatggcactatcrtataagagggtagatgatataatttatagatcattttatcacttaaagcacctctaagtgtagaaatagaatcatagaacctcatattcaaaagcctttctgtttatctatagtggaatcgattaaatcatatttgtgtaataaatgacagtcataacaaatacagtaattaaaatacagttgttttacaaatcactgtc

SEQ ID NO: 1156 - DNA, 401 bp, Homo sapiens
tttgacagtggaaaatggattaaaaaaacacacaacaacctactaagtcttgtagtttcttccatgtggtcttttcttatctagagatagtaagtcaggcatctacaggaaaagaatccactctagtgaattcgtgcctgcctttgaactgtgaaaatcctttgcattgccccacatttctaaagacccatgaattgtgcrgtcagctagaaatatcctgtttcaaaattgagattacgtgacactgccctagaatgacacttgagctgaatgctcttgtccactgctgtagggtacacatgaaaccttttacttagaaatttaaggttcttcatgtggctggaaaaatgccacaacatgacttttatcaggctaaaatttactgtgtcatgaygaaaatt

SEQ ID NO: 1157 - DNA, 401 bp, Homo sapiens
attgtgcrgtcagctagaaatatcctgtttcaaaattgagattacgtgacactgccctagaatgacacttgagctgaatgctcttgtccactgctgtagggtacacatgaaaccttttacttagaaatttaaggttcttcatgtggctggaaaaatgccacaacatgacttttatcaggctaaaatttactgtgtcatgaygaaaattgaataaagtaatcttgactcattttaatttatttcacctatgtctgactccagctttatcctaatatacaggacaaaagttatttccataggagcatctattatttgcctctatttctaaccctgtacaggtatgttagaaacactgaacataattttatatatgtctttgtctcatcaatacagtgcagttt

SEQ ID NO: 1158 - DNA, 401 bp, Homo sapiens
tcatgtaagaaagcataactgaagctcattagtcaaactaaaaagctcatgaaatttctcacctgaatctttcctcaccctgggcagagacttcctttcaatttgtgctcaattttaggcaacatttaaggatctgaataggcaaagagtgagagcaatgattgtaaatgtgttgttttaaaaggtttctccactaaattsgtatatgacaactgaaaaaaaccttgggacaatgtcattcagaccacaggaaagtgcttgaatatgttctctgatgctctttttagagcagctgatataaaaagcaaagaattttatgtccaaaagacttaggcaaaatatccgaacggaatgctgaatgcatggcttttcaatttatcacagtttatagacactttaca

SEQ ID NO: 1159 - DNA, 401 bp, Homo sapiens
ctcatggtactgaattggacactgtacaaattcatggtgttattcatattactggccataaaaagagcaagatcacatttatatatgttctggtgaaaattactctccagtgtttctgctgtcacctacccaaaccaagctgtatatttttttcttgagaattttgcatccatactgtttcttgtttggtttgcactgacraagaacattcttcctccacagcacagatctagttatttgcaaaagatatttttaaaattataagcaaatgttgatttagactccttacacattaattaagagaagcacttttgtggatgttctttggcttagttcaagactttgtcaatctgacttttcattaagactttatttattattttccccaaaaagtacttgtt

SEQ ID NO: 1160 - DNA, 401 bp, Homo sapiens
tttattattttccccaaaaagtacttgttgctcagatttgaataagagtagtttacttgtctacagataaaaacaccttggctgtattcaaagagtaaaatatttaattcaaattttaggctatctgaattttatcctttctgcttagaaatgataaacaaatatttattcttttattgagcaacagctatattccagaaytgttttaaatgcttgagattggggaatagagataagtgatactagcttggtatgcacgtatatgggtgaccagggggattgttaggaagaggaagaaagagaactattacaaacacgcatttataaggcagcttttaatcatcaataaaatatggtaaaatatgttagtttattaattatttgattaaacacatactttt

SEQ ID NO: 1161 - DNA, 401 bp, Homo sapiens
ctagccattctcaattcaaatgaccacaaattgagagaatcaggaacacttagatacttagccaacacttttcactaacttatttaggatatatgcctgagatcatgacaataataataatcatggtaaaagtagcaattattgttattttaatagtcataacagatgagtgttgccatggaggtcagtatcacaacacarccaagtccatctgcctcattttgatgttttagtggccacctaactgataccgtctggtgacactcaggtcagtgactcccgctttttctaagggatggcctcagtggtttggggaaggtgccaaggaaagctaactggggacttgctcctgataagtcagtgatcatggaccacaacaggtggccatgaccccagggggg

SEQ ID NO: 1162 - DNA, 401 bp, Homo sapiens
tttgggaagctgagcggggtggatcacttgagctcaggagtttgagaccagcctgagcaacatggggagatcctgtctctacaaaatatacaaaaaattagccaggcatggtggcacattcctgtagtcccagctacttgggaggctgagataggagaatcacttgaacctgggagacgaggttgcactgagctgagatcrtgccactgcactccagcctgggtgacagagccagaccctgtctcaaaaaaaaagaaaaaaattattcaatcatttatattttctggaattttttctaaaatttctcccagatactttaaaaatactcctgcaaacaatttccacttgcctagcaggccattcagaccacagaactaaaagcaaaatttatcagcctttcc

SEQ ID NO: 1163 - DNA, 401 bp, Homo sapiens
ttttctaaaatttctcccagatactttaaaaatactcctgcaaacaatttccacttgcctagcaggccattcagaccacagaactaaaagcaaaatttatcagcctttccttccaatttgccatacccccacaaatcgcacttataaagtcaagagtaagcacatttctaacaaggaccaaaacttttttctcaccaatgrcactttcctatatcaagtgtacctaatcaggcctatcattaagaaacacaacctttgctgtcctctgctatatcacatcatcttttcaattcagattctatttacaaaaatcctctaaactcattggtttttctacaatggtttttgatcacattatrttactgacaaatgctatttttatctcctatatgggtgaatca

SEQ ID NO: 1164 - DNA, 401 bp, Homo sapiens
agcacatttctaacaaggaccaaaacttttttctcaccaatgrcactttcctatatcaagtgtacctaatcaggcctatcattaagaaacacaacctttgctgtcctctgctatatcacatcatcttttcaattcagattctatttacaaaaatcctctaaactcattggtttttctacaatggtttttgatcacattatrttactgacaaatgctatttttatctcctatatgggtgaatcatgcatattaactctttcctgggatgatggacataaaaaatctcctttagagatttaattacatttaaattattttcaagtcaagtagagtataaattcacattttacaacagcccatcatagaagtctcactggatttgttttctttccgctaatgtc

SEQ ID NO: 1165 - DNA, 401 bp, Homo sapiens
aaactgataccaaggggtacctgggatgctgaatgttcagtgctaaaaccaggaaagtccaggcaagtgctgagtggatcaggctacatagattactgcacaattaattatagtaaattgattctgtatgcaacttaaataaacccagtttattgaggcatgatccagtttgcccgtgtgagaacctgatttctgtgaacrtggagatttagccataggtggctgaaggagagacataatatagatgatgatgttaatgatagcaatggtaaccatttattgatgacaggactggacttttttaagacttagccaaagataacattctctgaaatctttcttgatatccttaccctacccagaattttctgattcttcctttttactcccaatgtaacctg

SEQ ID NO: 1166 - DNA, 401 bp, Homo sapiens
tatagatgatgatgttaatgatagcaatggtaaccatttattgatgacaggactggacttttttaagacttagccaaagataacattctctgaaatctttcttgatatccttaccctacccagaattttctgattcttcctttttactcccaatgtaacctgtgccgaagtttattataatgcccttaaacttccttattwgtttatttgtcttcctctgctagaatataagcttctttaggaggatagaggcattatgttatttatctttgtaccccaagcatccagtatatttagtgaatgaatgaatgacctaggtatttttttttactcttcaaagtaatacaataaaatacatgataccatcctgttttactgatgagaaacaagtatctaagatg

SEQ ID NO: 1167 - DNA, 401 bp, Homo sapiens
ccaaacatagtgacttggaggaccctctcctttcagtaagagagtaggaatcagatatacaaatgaagactatgtcagtcttattatggatactgatgaaagttttctggtaatctgcaaaatagattttatagataattgctgtggaaaagaagtgactaaatgtaaaatataatctctgctggtatgtttagaccaggmaatcaaaatgcatgacctagtcagacaaagcaaaaggttctttacgtgttcttcttgtatcatcagtgagcctttttcatttaagtacaatgaagtgtctctgccttaagaaattcttcagaggcagaaattcattattctttattaactcactgtgcccttctccttcttctgcaccttttcctgtgtattgtctccca

SEQ ID NO: 1168 - DNA, 401 bp, Homo sapiens
tctgccttaagaaattcttcagaggcagaaattcattattctttattaactcactgtgcccttctccttcttctgcaccttttcctgtgtattgtctcccattttaaaatgtattaactgagaactaaagatagcaaagtgttgtcaatattataaagtatagtaagacagcatagaactacatggagaatatattgatamcagcatcttttacacagtgatgaattaataattaaaccaaacaaaaccaaacaacaaaacagttttacagctacttgggaaatatctgtaaacaaagtttcmtaataattaactcttggaatatcgtcacttgtacaaatgctgcaattctagcaagtttgggacacttacaggaaactgtctgcaaataaacatgtata

SEQ ID NO: 1169 - DNA, 401 bp, Homo sapiens
tttaaaatgtattaactgagaactaaagatagcaaagtgttgtcaatattataaagtatagtaagacagcatagaactacatggagaatatattgatamcagcatcttttacacagtgatgaattaataattaaaccaaacaaaaccaaacaacaaaacagttttacagctacttgggaaatatctgtaaacaaagtttcmtaataattaactcttggaatatcgtcacttgtacaaatgctgcaattctagcaagtttgggacacttacaggaaactgtctgcaaataaacatgtataatgattttagtgtatatgacatgaaacagacggcgacccatttattaaggtccattacacagatataggagggactttaaaggcatcacaaaatacttgcca

SEQ ID NO: 1170 - DNA, 401 bp, Homo sapiens
ccaacagagtcaattttcatgtttatttattctttgctttagaatgttatgtcagttgacagtattcagggcttgtgttgatgtaaattgccataaagcaaggaaacacgggctatagtactgtcagggaggctcagcactgcagaacaacacaatttaagaaaagcatttgcagaaagattcagtgtcagtcttcggaarttgactgtagatgcaaattggcatcaactacttcacaatctccctctaacaaaagagatggaaagggtggaatcaccaaacagagtgcacttttcggcatagtagctttcatgaagacaaaaataggatcccatttgttcattcacaatggatattcagactccacattctgccacccccatgttttattggagcctgca

SEQ ID NO: 1171 - DNA, 401 bp, Homo sapiens
ataggaaaaatgatttgactagagagtcaatatgcctgaattcatatctcagctctgccaccatcactggtttaattacatttggggagtcacagcgtggtggggcctcaatttattcttttggagggacttagtctaaatcagtgattgtcaactagaatgaaagtgagggaactcctcccttggagacttgtcagaatyttggaggagacgttttgcagacaaagcccaactmttttccytccacactcctacctccaccaccatcacaagcaaattctgatgtttgttcctagacttctaagattttgactccctcatcttccattgaggattgcttatggaaacaacgtaatagattcctagcaaatcttcatgtatagtgtgtcagcaactagtct

SEQ ID NO: 1172 - DNA, 401 bp, Homo sapiens
cctgaattcatatctcagctctgccaccatcactggtttaattacatttggggagtcacagcgtggtggggcctcaatttattcttttggagggacttagtctaaatcagtgattgtcaactagaatgaaagtgagggaactcctcccttggagacttgtcagaatyttggaggagacgttttgcagacaaagcccaactmttttccytccacactcctacctccaccaccatcacaagcaaattctgatgtttgttcctagacttctaagattttgactccctcatcttccattgaggattgcttatggaaacaacgtaatagattcctagcaaatcttcatgtatagtgtgtcagcaactagtctcaagtgtctaacgttcttttcaactttaaaataa

SEQ ID NO: 1173 - DNA, 401 bp, Homo sapiens
tcatatctcagctctgccaccatcactggtttaattacatttggggagtcacagcgtggtggggcctcaatttattcttttggagggacttagtctaaatcagtgattgtcaactagaatgaaagtgagggaactcctcccttggagacttgtcagaatyttggaggagacgttttgcagacaaagcccaactmttttccytccacactcctacctccaccaccatcacaagcaaattctgatgtttgttcctagacttctaagattttgactccctcatcttccattgaggattgcttatggaaacaacgtaatagattcctagcaaatcttcatgtatagtgtgtcagcaactagtctcaagtgtctaacgttcttttcaactttaaaataataataag

SEQ ID NO: 1174 - DNA, 401 bp, Homo sapiens
atttaaatctggatagctcccttttaaatccagccctctgattctataaggcaaatgacaaggctgtctagacatggagtacattgagcaaggtttagatgagggagccccggagactgtgagacagacctgttctgtgcctgagaatgtcagtgatgactcacaggaggtggagaaaagtgtgctcaatgtatgggccasgctcagggagctccttgaagacagatcatttggtattaatgatacagcgataccacaaagcacaggaggtgtagcctgctagcattgaagttaggaactgatttgaattaacccagtgtttgaatctggatgcaagagcctgtatggtatcttgcatgctaacttcttcataatcttgttcctgaatgggtgccagattg

SEQ ID NO: 1175 - DNA, 401 bp, Homo sapiens
cctactagctgattcacatcgttttcataaccaaaatatagctcatggcttgagtatgaaaccctgaccaaagtatggaatttcacatacatgtcatgataatgtcctagtcagattcagtcctacctcttgcttctgaaaatgtgctagcttctgttctaatcctaattgcatgaattagttcattgtccagtttagaaragaggaacgagtaggaagctgctttggttctggggtcaatctaggacttcaggtctattttagggaaagcattctagaatgtccttgcccttcctgatacactttgatataccttcaactttgagatcattgacttagtgttatcttgaatgagggggtccaatasagccagctactccatgctgatttagatctcaatg

SEQ ID NO: 1176 - DNA, 401 bp, Homo sapiens
aattgcatgaattagttcattgtccagtttagaaragaggaacgagtaggaagctgctttggttctggggtcaatctaggacttcaggtctattttagggaaagcattctagaatgtccttgcccttcctgatacactttgatataccttcaactttgagatcattgacttagtgttatcttgaatgagggggtccaatasagccagctactccatgctgatttagatctcaatgcttttgaaattcaagtttttaaagcacttgactctctgttttctccaaatgaaatcctattttgtatttaaaacagtaagaccagatttccccttttgaagtaattataggatcccaagaacccttaattccactggtcccatggtctacttatccccccgccccc

SEQ ID NO: 1177 - DNA, 401 bp, Homo sapiens
taggaaaatgtctgctgtgctccagccagagcagacctactgtattgcaaatttatcgtggctggaccatcctccagagatgtatgccataaggacaatggaggcctcagctaagtacctcctgctgcattcattcccagggtagtaggtggtatagctgcaagacacggaacccagtattaggccttgctccattttctytaggcttcaaagctctgagccagtgatagtttataaaagcccaggactccaaagaattaaaatcagcacctgtagatctcctggtgaagataaactccatgggcatgtaaagaaagcaataaagatacacacatagtttttttttttcttttgaatatcaacagtaaccttgagcagagtgactctttatcagggctctt

SEQ ID NO: 1178 - DNA, 401 bp, Homo sapiens
ttctctgtcaggggtcctgccacctgacatgtgcaggtccagttaggtagttgaaaaggacacattactacacttatcagggttctcactacaaacaaattttcatagtccttctggaaataagccacatcaccgaatgcctttccggtagctgacatgattgattgtggacaacgaagaagtcacttattcctaaggaaragactggagtgagggttgctgtttgcacatacataaaatcctagaagagataccaaagctacattatgcagaaagattattattttagccagtggctctgaggacaacctcatttgtcttctctatgggtcactctttttttttttttttttcttttgagacagagtctcgctctgtcacccaggctggagtgcagtggc

SEQ ID NO: 1179 - DNA, 401 bp, Homo sapiens
tgggttcacgccattctcctgcgtcagcctcccaagtagctgggactacaggtgcctgccaccacactggctaattttttctatttttagtacagatgaggtttcacatgttagccaggatggtcttgatctcctgaccttgtgatccgcccacctcggcctcccaaagtgctgggattacaggcgtgagccaccacaccyggccaggtcactcattttttaagtgaatattttcatttccaaaaaaaaaaaaaaaagcctcatgtttccaaagtggcataaaaggccctggcatgtagagtgtagaacagaggctcctcctttttagccagtctctatttcagaaatcattagatagaacatacttggtctgaaaaaaaactatgaaattttgatccccc

SEQ ID NO: 1180 - DNA, 401 bp, Homo sapiens
cttcatgacccatcatggtgctcgatcagttccttgttttttcttttgagcatgactaataataataaagtctgagctctggtctcatatcacatattttaattgtataaaacaactatgaagacccacactgacaagatcctgagcctaaataaaattaggtcatgtctaaaagatattgtcctttgaattaagcagaaygtgtgggtgtgtgcacatgtgtgagagagagggagagtttgctcacacacagccttgacactgataatattttcccagacagcttctactcagtgactttgtagtaaaatcaaaggagctttagtgtgtactcattttacagattagaatagtagagcccagagagagtaagttatttgcctgaaatcccacagcgaggg

SEQ ID NO: 1181 - DNA, 401 bp, Homo sapiens
attttagcacactgatcaatcttgagatactaaaatataccagcaaagttgtgaactcgaaaattactaaacaggctgggcatggtggctcatgcctgtaatctcagcactttgggaggtcgaggaatgagattgcttgagcccaggagtttgagatcatcctaggcaacaagaacaacaacaaaaaacaattagttgggsatggtggcgcatatctgtaatcccagctactgaggaggctgaggcagaagaatcgcttgkacctgggagttcaaggctgcagtgagctatgatggtgccactgcactccagcatgggtgacagagtgagaccctctctcagaaaaaagaaggaaagaaagagagagagggtgagagagagagagaggaaggaaggaagga

SEQ ID NO: 1182 - DNA, 401 bp, Homo sapiens
aaattactaaacaggctgggcatggtggctcatgcctgtaatctcagcactttgggaggtcgaggaatgagattgcttgagcccaggagtttgagatcatcctaggcaacaagaacaacaacaaaaaacaattagttgggsatggtggcgcatatctgtaatcccagctactgaggaggctgaggcagaagaatcgcttgkacctgggagttcaaggctgcagtgagctatgatggtgccactgcactccagcatgggtgacagagtgagaccctctctcagaaaaaagaaggaaagaaagagagagagggtgagagagagagagaggaaggaaggaaggagaaaagaaaagaaaagaaaaaaagaaaaagactgaacaaaacttgagaaaagcaatgtac

SEQ ID NO: 1183 - DNA, 401 bp, Homo sapiens
gtctgctcttcccctcttcacccccagccccaggtggaaatgaagatggttttccattttgttttgaagagagagcttcatgtcactgatctataatgtgaaggaaaatatcttcatcaaaaccaacattcttaggaatacatagaaaataaaaagactactcatgtcttagaaaagttttcccaaaagttggatcatgtkggataatgttatgatccttttcactttcaaagttccctagttcccttagagaggggaaaattatattactggtagaaatcaacatttccttttctttagtgaaaaaaataacacagcactctttaattgaaacctgtgtatctttgccctccccactttctgcctttgctttttcattcacatttaactcctgcagcaac

SEQ ID NO: 1184 - DNA, 401 bp, Homo sapiens
ctgcagcaacaataacctctgggctgttctgcattagagagaactcaagagccctggaaattataatttcagaagtattgataatattaaacaacatcaaaaatttttaccacttttgcctgcccttcttacttttttcacaagttaattgaagatggaaggcagtaaagcctcgtgattctttttcaaaaaggttaaaawacaatataatcyatcttttttttttttttttttttttgacacagagtcgtgctcttgttgcccaggctggagtgcaatggcgcaatcttgactcaytacaacctccgcctcccaggctcaagcaattctcctgcctcagcctccaagtagctgggattacaggcgtgcgccaccgcacccagctaagttttgtgttttta

SEQ ID NO: 1185 - DNA, 401 bp, Homo sapiens
taacctctgggctgttctgcattagagagaactcaagagccctggaaattataatttcagaagtattgataatattaaacaacatcaaaaatttttaccacttttgcctgcccttcttacttttttcacaagttaattgaagatggaaggcagtaaagcctcgtgattctttttcaaaaaggttaaaawacaatataatcyatcttttttttttttttttttttttgacacagagtcgtgctcttgttgcccaggctggagtgcaatggcgcaatcttgactcaytacaacctccgcctcccaggctcaagcaattctcctgcctcagcctccaagtagctgggattacaggcgtgcgccaccgcacccagctaagttttgtgtttttagtagagacgggg

SEQ ID NO: 1186 - DNA, 401 bp, Homo sapiens
tcaaaaatttttaccacttttgcctgcccttcttacttttttcacaagttaattgaagatggaaggcagtaaagcctcgtgattctttttcaaaaaggttaaaawacaatataatcyatcttttttttttttttttttttttgacacagagtcgtgctcttgttgcccaggctggagtgcaatggcgcaatcttgactcaytacaacctccgcctcccaggctcaagcaattctcctgcctcagcctccaagtagctgggattacaggcgtgcgccaccgcacccagctaagttttgtgtttttagtagagacggggttttaccctgttgccaaggctgatctcaaaactyttgacatcaggtgatccacccacctcgacttcccaaagtgctgggattac

SEQ ID NO: 1187 - DNA, 401 bp, Homo sapiens
gtcgtgctcttgttgcccaggctggagtgcaatggcgcaatcttgactcaytacaacctccgcctcccaggctcaagcaattctcctgcctcagcctccaagtagctgggattacaggcgtgcgccaccgcacccagctaagttttgtgtttttagtagagacggggttttaccctgttgccaaggctgatctcaaaactyttgacatcaggtgatccacccacctcgacttcccaaagtgctgggattacaggcgtgagccaccgcgcctggccaaagtaatctatctttaaagatggtctgctatccttaattgtgtatttggtataggttaatagagtgaaagtcctgtaagctataggattagatggacgttgcctgcaattcaattccatctgtag

SEQ ID NO: 1188 - DNA, 401 bp, Homo sapiens
cgtgggctagtcacctctatgagctttgtcatggctataattttcatcaccagtcagtccttcaaatagatatttcttagagatgcatgggtaattagagaaactctcaattcagttattaaatttttcctactcatatccagagttaactgctcatttttagcttgaacaaattagaggattgcttagtgctgaatactwgtctctttgttctataagcttgacagagctttcttattgcctatatgataatgttggaccatcttcaagtgtctacagtctttcctggggctggtatggtgctccagcataaatgcataaatgtgtaatgcagtggaatttcaactcagtgataaaattctctaaaagagagaactaattaattttagagccagaaagag

SEQ ID NO: 1189 - DNA, 401 bp, Homo sapiens
tatatgataatgttggaccatcttcaagtgtctacagtctttcctggggctggtatggtgctccagcataaatgcataaatgtgtaatgcagtggaatttcaactcagtgataaaattctctaaaagagagaactaattaattttagagccagaaagaggcctatatccaacctatttatgtatgtgctagagctggttastacagagcaaattagagaccaataaaaagacatggtgatcacttcaaattgaactgtcttaacagaaataaattgcagaagcagataagattttcacaaatcagtgcagtatggccctgttactttttatagcatctggattatggcttagacttattaagaattagaaaaacaaatttcagtgccatcactgatacctc

SEQ ID NO: 1190 - DNA, 401 bp, Homo sapiens
ggaggccaaggcaggcagatcacgaggtcaagagatcgtgaccatcctggccaacatggtgaaatctcatctctactaaaaatacaaaaattagctgagcatggtggcacatgcctgtagtcccagctactcgggaggctgaggcaggagaatcacttgaacccaggaggcagaggttgcagtgagccgagattgcaccamtgccctccagcctgatgacagcgagactccatctcaaaaaaaaaaaaaatatatgaaaaggtaacagcaattttcagtgagtaagcatataagtaaaggataaggagagaattgcctcttttctgtcgcattcaaggaacagctggaaaatggaagaaacatagaaggagagaaacatcaagaaatacgtattagtcatt

SEQ ID NO: 1191 - DNA, 401 bp, Homo sapiens
ttgtgtgaaccatctttgaacttagtcaaatgcagatgtaattttatattaagactttaaaagaatggaaaaatggcttcaaacataggagaacaaaattttctgctttctttgtttacttcttattttatgtcaccccataaatgtgattggtacggcttttgagattattggtttagaatttcttaccctttgttgtcytgagccatcttttctctagaaacatgctaatattacagatggttcaaatgttcctataatgtcaatgtgtaaatccatattgagcaatgtagaggtccggctgtgaataggacaaagaaaaaattaagaaaatatttaaatgtacatacctccttttctaggatttaataactcgaattatttataaaatgttattgaca

SEQ ID NO: 1192 - DNA, 401 bp, Homo sapiens
tattcaagttattttttaagcagatgttctgattaaaactctgtatctgtctttggtgctttagctagcaaaaaaataatgaatataaaacaattgcctccccatatatattggtatatataatttattagaatgtttttcttttcacttttaatgaaataataatgaaatttcaatatgtataactggtgaaataatttyggcaatactgtgagtgaaatgatagggcaaaaatgaatgcttttatttaactcacaattgatataaacaaaaaaatcaaatgatccagtcaggtcgagggtaaattctcttaaggaaataacaggtaaatacttttccttgagtgtaaagacacttatgtgtatttattaacacatacatagaatttagataagaattat

SEQ ID NO: 1193 - DNA, 401 bp, Homo sapiens
caagatcatgagatcacaaatgtgacttttccttaagatttcatcacaagataaatcaaagtgctaggaattgtattttcccttttcctagtaatcaagtatccttctcagatgactctttttgtaaaagtaacaacttctcatctttgagacttgactcacataccaaatatcaaaaatggaaaatctttgaattctttktcctgttgtgggaatacgagtcatttataacaacaaaaaaaatcgataggaaatggatgttttagggaagtgtatcctgagtgctgtctttaaggcattgattggagactgcccacatctaaaaaatgactctaggacatcactctcatgtatttccgtgaaaaagctggtggaaaaatgtgttttcttctaaaaggcta

SEQ ID NO: 1194 - DNA, 401 bp, Homo sapiens
tctaaaaaatgactctaggacatcactctcatgtatttccgtgaaaaagctggtggaaaaatgtgttttcttctaaaaggctatgtgtgggacgtgtgtcagtgttcacatgtgcctaataggcatacgtaaaatcacacttgtatgaaaatcaagtaaatctgctgaaataaacagcaacccatgtttggggcatttgtrttggtagagattggcttttaaaggagaatggattaatatatgattctcttgtcggtattactatgaattgttcttttttgaggaggagtctcgccttgtggcccaggctggagtgcagtggtgcagtcttggctaactaccacctcctcctcctgggttcaagcgattctcctgcctcagcctgctgwgtagctgggatt

SEQ ID NO: 1195 - DNA, 401 bp, Homo sapiens
tggggcatttgtrttggtagagattggcttttaaaggagaatggattaatatatgattctcttgtcggtattactatgaattgttcttttttgaggaggagtctcgccttgtggcccaggctggagtgcagtggtgcagtcttggctaactaccacctcctcctcctgggttcaagcgattctcctgcctcagcctgctgwgtagctgggattacaggcacatacaatccacacccggttaacttttgtatttttagtagagaagggtttcgctctgttggccaggctggtctctaattcctgacctgatctgccttcctcggcctcccaaagtgctgggattacaggtgtgagccaccatgccaggcctgaattttcacttgcaaaattatcagtcagtt

SEQ ID NO: 1196 - DNA, 401 bp, Homo sapiens
acagggtggcatttaattatatttgtttacagaaatatttttatatttgaatttctttcataacagtgtttattgtggtcaaaggatgggagggatgaggaaataatatttgaagaccacaggggcattcctcacctctgtagtcttattatctggccttgaaacactacgacattctttaactgaatttattaggggctraataccaacaacataagtcagaaaagggtttacattgacccctttggattctaaatattgtaataaatattattagttccgaaatatcatatctgtttgatttcccaaatgattgcagaaawgcttygatctttttagtcctatratattgtagagatatctcactaaygatgttttttttttttttktaagatrgagtc

SEQ ID NO: 1197 - DNA, 401 bp, Homo sapiens
gggcattcctcacctctgtagtcttattatctggccttgaaacactacgacattctttaactgaatttattaggggctraataccaacaacataagtcagaaaagggtttacattgacccctttggattctaaatattgtaataaatattattagttccgaaatatcatatctgtttgatttcccaaatgattgcagaaawgcttygatctttttagtcctatratattgtagagatatctcactaaygatgttttttttttttttktaagatrgagtctcgctgtgtcgctcaggctrgagtgcartgagccatgtttrtgccactgcactgtagcctgggtgacagagcgagaccctgtctacaaaaaaaaaagaaaagaaaagaaaagaaaaaaagaa

SEQ ID NO: 1198 - DNA, 401 bp, Homo sapiens
ttcctcacctctgtagtcttattatctggccttgaaacactacgacattctttaactgaatttattaggggctraataccaacaacataagtcagaaaagggtttacattgacccctttggattctaaatattgtaataaatattattagttccgaaatatcatatctgtttgatttcccaaatgattgcagaaawgcttygatctttttagtcctatratattgtagagatatctcactaaygatgttttttttttttttktaagatrgagtctcgctgtgtcgctcaggctrgagtgcartgagccatgtttrtgccactgcactgtagcctgggtgacagagcgagaccctgtctacaaaaaaaaaagaaaagaaaagaaaagaaaaaaagaaatgta

SEQ ID NO: 1199 - DNA, 401 bp, Homo sapiens
ttattatctggccttgaaacactacgacattctttaactgaatttattaggggctraataccaacaacataagtcagaaaagggtttacattgacccctttggattctaaatattgtaataaatattattagttccgaaatatcatatctgtttgatttcccaaatgattgcagaaawgcttygatctttttagtcctatratattgtagagatatctcactaaygatgttttttttttttttktaagatrgagtctcgctgtgtcgctcaggctrgagtgcartgagccatgtttrtgccactgcactgtagcctgggtgacagagcgagaccctgtctacaaaaaaaaaagaaaagaaaagaaaagaaaaaaagaaatgtaattcactttcttctggtc

SEQ ID NO: 1200 - DNA, 401 bp, Homo sapiens
cgacattctttaactgaatttattaggggctraataccaacaacataagtcagaaaagggtttacattgacccctttggattctaaatattgtaataaatattattagttccgaaatatcatatctgtttgatttcccaaatgattgcagaaawgcttygatctttttagtcctatratattgtagagatatctcactaaygatgttttttttttttttktaagatrgagtctcgctgtgtcgctcaggctrgagtgcartgagccatgtttrtgccactgcactgtagcctgggtgacagagcgagaccctgtctacaaaaaaaaaagaaaagaaaagaaaagaaaaaaagaaatgtaattcactttcttctggtcagcagctgacaggatagaacacat

SEQ ID NO: 1201 - DNA, 401 bp, Homo sapiens
ttattaggggctraataccaacaacataagtcagaaaagggtttacattgacccctttggattctaaatattgtaataaatattattagttccgaaatatcatatctgtttgatttcccaaatgattgcagaaawgcttygatctttttagtcctatratattgtagagatatctcactaaygatgttttttttttttttktaagatrgagtctcgctgtgtcgctcaggctrgagtgcartgagccatgtttrtgccactgcactgtagcctgggtgacagagcgagaccctgtctacaaaaaaaaaagaaaagaaaagaaaagaaaaaaagaaatgtaattcactttcttctggtcagcagctgacaggatagaacacattggactagaaacctgttgt

SEQ ID NO: 1202 - DNA, 401 bp, Homo sapiens
gggctraataccaacaacataagtcagaaaagggtttacattgacccctttggattctaaatattgtaataaatattattagttccgaaatatcatatctgtttgatttcccaaatgattgcagaaawgcttygatctttttagtcctatratattgtagagatatctcactaaygatgttttttttttttttktaagatrgagtctcgctgtgtcgctcaggctrgagtgcartgagccatgtttrtgccactgcactgtagcctgggtgacagagcgagaccctgtctacaaaaaaaaaagaaaagaaaagaaaagaaaaaaagaaatgtaattcactttcttctggtcagcagctgacaggatagaacacattggactagaaacctgttgtattctta

SEQ ID NO: 1203 - DNA, 401 bp, Homo sapiens
agaaaagggtttacattgacccctttggattctaaatattgtaataaatattattagttccgaaatatcatatctgtttgatttcccaaatgattgcagaaawgcttygatctttttagtcctatratattgtagagatatctcactaaygatgttttttttttttttktaagatrgagtctcgctgtgtcgctcaggctrgagtgcartgagccatgtttrtgccactgcactgtagcctgggtgacagagcgagaccctgtctacaaaaaaaaaagaaaagaaaagaaaagaaaaaaagaaatgtaattcactttcttctggtcagcagctgacaggatagaacacattggactagaaacctgttgtattcttacttttacccatgacatggcttcttt

SEQ ID NO: 1204 - DNA, 401 bp, Homo sapiens
gtttacattgacccctttggattctaaatattgtaataaatattattagttccgaaatatcatatctgtttgatttcccaaatgattgcagaaawgcttygatctttttagtcctatratattgtagagatatctcactaaygatgttttttttttttttktaagatrgagtctcgctgtgtcgctcaggctrgagtgcartgagccatgtttrtgccactgcactgtagcctgggtgacagagcgagaccctgtctacaaaaaaaaaagaaaagaaaagaaaagaaaaaaagaaatgtaattcactttcttctggtcagcagctgacaggatagaacacattggactagaaacctgttgtattcttacttttacccatgacatggcttcttttagaatac

SEQ ID NO: 1205 - DNA, 401 bp, Homo sapiens
cctttggattctaaatattgtaataaatattattagttccgaaatatcatatctgtttgatttcccaaatgattgcagaaawgcttygatctttttagtcctatratattgtagagatatctcactaaygatgttttttttttttttktaagatrgagtctcgctgtgtcgctcaggctrgagtgcartgagccatgtttrtgccactgcactgtagcctgggtgacagagcgagaccctgtctacaaaaaaaaaagaaaagaaaagaaaagaaaaaaagaaatgtaattcactttcttctggtcagcagctgacaggatagaacacattggactagaaacctgttgtattcttacttttacccatgacatggcttcttttagaatacaaactgtttagaa

SEQ ID NO: 1206 - DNA, 401 bp, Homo sapiens
cagagttgtagcccttcagtaacaaagaatgagtcagaggaaatgagttaatttaacaaattgctagttgcctaccagatatcatagcaaggaatgatatatgcaaggtgtgttaaaggcaatgtttccttaatttcttctttctatctcccatctcccaatgtcctctggggaggccgtagaggtgggagggacatattwagtaaaaagtgtgaccacttgctgagtaatttttagtgatttgttgagctggattaagtgaatttagagttgaatcttcaaaatgatcatttcctttttttaagagtttatattctggatattttcatttgaagagcagtgatagtatccggctaaggtttactaaattgttcaagtgagtttgcagaagactaagtgaa

SEQ ID NO: 1207 - DNA, 401 bp, Homo sapiens
aagtattccttcttggaaaaatatcactaaaatgtaatgttcctcaagtcatagtgcaaacaaaattatatttatcatttacagacaggttttattggtcctggtgcattcatctgctgatggccaataaaagctatacaaagtctcatcaatgaaattagtaatctgtggggacaaacatgccattagtgcctgtcattygagatttgtgatcattgacgtgctttttatggcatctgaaaatattagtttgactttaaaaaatgtagagttgtttctattgttggatatatttataaaattctgaacataaaaatgctctttggtagccacttgaatttttaaaactatatttaataaaatacagcttttaggaatagcaatcagcatgggataggtga

SEQ ID NO: 1208 - DNA, 401 bp, Homo sapiens
aaactatatttaataaaatacagcttttaggaatagcaatcagcatgggataggtgacaatgaattttttttttttttttttgagacggagtctcgctgtgtcgcccaggctggagtgcagtggcgagatctcgctcactgcaagctccacctcccgggttcacacctttctcctgcctcagcctcccgaatagctgggamtacaggctccagccaccacacccgggtaattttttgtatttttagtagagatggggtttcaccatgttagccaggatggtcttgatctcctgaccttgtgatctgcccgcctcggcctcccaaagtgctgagattacaggcgtgagccaccgcgcccggccaagtgacaatgtattttaagtagcctctgctatccttga

SEQ ID NO: 1209 - DNA, 401 bp, Homo sapiens
actgtcgtggagaagccccttttggatgaagctttacggaggattttcaaatgttaattatatttacaaacagatcagatgtaggcatagatatattagaatactttatatcttctctcatttatttttctactgctagataaatgggacttataagtagctgagtaggcaaacaagaaagaatgcatacagttttatcartttatctgagattttgtgataagctacagaccaagtcaaatggactagttttggcaggggcttgctgtccatatgatggtcagttagcttttttctgagttaaacttgaaaactaagaactttaagaagtgcatgggtatatataggtgtgtgtgtgtgtgtgtgtttgtgtgtmattttacaagactgtagaattataa

SEQ ID NO: 1210 - DNA, 401 bp, Homo sapiens
agaaagaatgcatacagttttatcartttatctgagattttgtgataagctacagaccaagtcaaatggactagttttggcaggggcttgctgtccatatgatggtcagttagcttttttctgagttaaacttgaaaactaagaactttaagaagtgcatgggtatatataggtgtgtgtgtgtgtgtgtgtttgtgtgtmattttacaagactgtagaattataaaatgacatttgttttaaggaatatttgattgacagtttcacttaccaacgttagcctctaattatgacactgaggatacccaaatttaaaaatttcctttataatggtccctgagacctggtgattgaggtcataaaaaaggaatggtagttttctttcagaattttaaattttc

SEQ ID NO: 1211 - DNA, 401 bp, Homo sapiens
cctctaattatgacactgaggatacccaaatttaaaaatttcctttataatggtccctgagacctggtgattgaggtcataaaaaaggaatggtagttttctttcagaattttaaattttctcaaataatatttcaccaaatattagccacacttgtatactttgactctgttggtcgttaaaatgtatagtcataattamtcctatggaatagggatttcaatagaaagaaagctttagaaatgaatcttctttgcagataaatgctatttaattttcagagttaatataattcaaattatttagaagtttacaagattctattataaagccagtttatttatttttttaattccattatcatctgaatattctaaaaaatgtaaaaagaaatctatttg

SEQ ID NO: 1212 - DNA, 401 bp, Homo sapiens
gaagaaaatgtaagaatgttgactgttcactaagccgaagattccctttttgctttcaaagcttttctcaaggacattaaacactcttcctaattactttttattgatttcttgacatttctactcaacattgactgcttatttttaggaaacaaagaagcctaagtgaaaaatgttaatggtgcatttgaaactacaaarttcaatattttagtcacgcctcttatatgtaattgtaggtaaaaactatataatatttttgccatgtgcctcagctctcttatcaccgaagtaaatagaaaattctgtgattctcagatttcttccatagctttaacttattttgaacaaatctgtgacttaccttgctatatttcaaattttattttattattattcat

SEQ ID NO: 1213 - DNA, 401 bp, Homo sapiens
agctttaacttattttgaacaaatctgtgacttaccttgctatatttcaaattttattttattattattcatttttatttttatttttttgaaacagggcctcactccattgccccagctggagtacagtggcatgaactacagcctcaatttcctgggctcaaatgatcctcccacctcagcctctcaagtggctgggamtatgggcccataccaccatgcccggctaatttttaaattgttttatttgtagagatggggtctggtactactatgttgcccaggctggtctcgaactcctaggctcaagcaatcctcctgcctcagcctcccaaagtgctgggataataggtgtgagccaatgagcctggcatattttattatatatatattttttgtct

SEQ ID NO: 1214 - DNA, 401 bp, Homo sapiens
atgtccctggagataatttttttattttatgtaatttatctgcatctcttatagaaatactttttttgtcttttctccctatctctttgttgtgtacaatcagcttttaaaggatccagtggtattaattttgcattgcggtcaatcagagatcttatgcaaatattaaatattgcacaggcatcataactaaatttagcrtttcatttggaatagttccttgtgccataactccctgatggtgtttataactcagcatatttatatttgtatgtgcatttttatgtatatgcatttctctttggtctcataaaaaagtaaagtgtgtatttttttctaactctacagtcattactaaatgaaaattaagttgtttttaaggcatattttttaaaaggaaa

SEQ ID NO: 1215 - DNA, 401 bp, Homo sapiens
tacttttaacatttcacacccagtaagttggataacggatggcagagtgagcctgcgtaggtaataacttattattattacccttaccgtacatggcccttttccttgtacttttctccttgagccaataatgactttgatggttcagtctttctgcactttgtagaaaccatatcccaaacagtattttctagacatcarttctagcatgtgaaagaatctagacagcctctccgattttcatgcttctgggacagaaaagtatttatcacaggtaatgatgataatccagttaaatttgttatgcctttccttactttcaaagttaatttccatttttccattttggatgctgtgttttatggaaattgtctgtaaagagtctactagccttacatgta

SEQ ID NO: 1216 - DNA, 401 bp, Homo sapiens
ttaaataatttttaaggaacttgtctcttattgtaaattatgtctggagaattagaagtgctacacataaaaattctgtctttggaatcagtacagatccatgttaacctcgttaaaatgatgacttctcatctaacttcaaatattcatttttaccttattaagtcatagagtttagctaagcactgagggtatgtcctytttgttattttgattctgaaatcctcctgatggtttttagggtagttatggttaagattttggtgccacgcctgatatttcctaccattactgtggtagtgatggatttcttctgtctggacctccgcttctagtggttctctgatctaagcatggttggaactttgtactgacctcatactatgcctagtcacagagct

SEQ ID NO: 1217 - DNA, 401 bp, Homo sapiens
ttcctaattgagttgaacttcaaattcattgtctaaatcctaagaaatgttgaattttcacaaaccccatttcctgcctgctctctccttttctcccatacatccaccatcagatttttttttgtttactttctctctgataattcatgagtaagtttaaaaaaaaaaaaatgtgtggccagagttttctgttttctgtaratattgctgtgggtttgcccatgcctagttccaacttttaaataaatatatataataatatatttatgttataaatatataatatatttgttataaatatattatatatttatataattaaaatcttatatgtaattataacataaatatatatgatattatatacatatatatatttctttttttttgagatggaatct

SEQ ID NO: 1218 - DNA, 401 bp, Homo sapiens
tataatatatttgttataaatatattatatatttatataattaaaatcttatatgtaattataacataaatatatatgatattatatacatatatatatttctttttttttgagatggaatctcgctctgtcaccctggctggagtgcagcggtgcgatctcagctcactgcaacttctgcttctagggttcaagcaattytcctgcctcagcctccccagtagctgggattacaggcacacaccaccatgcccagctaatttttgtatttttggtagagacggggtttcaccatgttgagcaagcttgtctcaaactcctgacctcaagtgatctgccgacctcggcctcccaaagtgctgggattacaagtgtgagcccctccacccaaccgaaaagaa

SEQ ID NO: 1219 - DNA, 401 bp, Homo sapiens
gtgagcccctccacccaaccgaaaagaaatattttgatgctatgaatgcatttgtcatttctattctgtttcatccatgtgttcttcttgtttacctttgtagtagtcatttacagtgaaaataattgacaaatgacatggtgttatgttcttgaaaacaaacatacaaacaaaaacaaaaaatgaaagcagacaaatgamcaaaatggccaagtaggtgtttaaaggcttaaattgagcaaagaataaaatggtattttttaaatgttaaagaatgatgatgtgttttaatagtattgttaactattgaatcaatttatgtttagtctgcttaaaattatattttggattcaagatggactactgctatcaattgattagattgaaaacaagcaagcaag

SEQ ID NO: 1220 - DNA, 401 bp, Homo sapiens
caagtaggtgtttaaaggcttaaattgagcaaagaataaaatggtattttttaaatgttaaagaatgatgatgtgttttaatagtattgttaactattgaatcaatttatgtttagtctgcttaaaattatattttggattcaagatggactactgctatcaattgattagattgaaaacaagcaagcaagaatctagacracacaaatgggggaaaaaataatgagatgtattggacactttcctggctgtaggaaaagagctttgataaaaggagtgatgagatataattaagcacaaagtaacctacatgcttatttatcagtgaatctttcagttccagatcatttcttctacaaaaaactaaagaataaaaatcagtctttcagtcactgggtgac

SEQ ID NO: 1221 - DNA, 401 bp, Homo sapiens
gctgatttttttttaagacaggatcttgctctgttgcccaggctggagtgtagtggcacaaacatggctcactttaactttgaactcctggacctcagtttcccaagtagctgggaccacaggcacgcaccaccatgctcagctaatttttaaaattgttgtaaagacagggcctcaccatgttgcccaggctggttgaamtcctgtgctyttgccatccacccgcctcagcctctgaaagtgctgggattacacgtgtgaacaactacacccaactggattgctgaatttttataacatgtctctggtaactaagatcctttgaactatgaccattgaattcctaggacttgtgtgatctcagtagagcaatgactcacttccctcaggttttcagactt

SEQ ID NO: 1222 - DNA, 401 bp, Homo sapiens
ttttaagacaggatcttgctctgttgcccaggctggagtgtagtggcacaaacatggctcactttaactttgaactcctggacctcagtttcccaagtagctgggaccacaggcacgcaccaccatgctcagctaatttttaaaattgttgtaaagacagggcctcaccatgttgcccaggctggttgaamtcctgtgctyttgccatccacccgcctcagcctctgaaagtgctgggattacacgtgtgaacaactacacccaactggattgctgaatttttataacatgtctctggtaactaagatcctttgaactatgaccattgaattcctaggacttgtgtgatctcagtagagcaatgactcacttccctcaggttttcagacttagaggaaaat

SEQ ID NO: 1223 - DNA, 401 bp, Homo sapiens
atttttataacatgtctctggtaactaagatcctttgaactatgaccattgaattcctaggacttgtgtgatctcagtagagcaatgactcacttccctcaggttttcagacttagaggaaaatccaaggatcagtctgtagtataatgctaggcatgaaaggcatgaggaaatgatgggagcctccagacagaaaaggtmtcccactggtgactgatttctattcagagacaatgccatccctgtgattgaagctccaacacactgaaaaggtgtgaaaccaagaaaagtctctctttcaataaaagttttccatatttcaaaaattttcagaagtaaggatttcttaagggaaaagccatgaataaatcaggccctttttttttttttttgagacagag

SEQ ID NO: 1224 - DNA, 401 bp, Homo sapiens
cagagtcttgctctgtcgcccaggctggagtgcaatgatgtgatcttggctcactacagcctccgcctccctggttcaagtgattctcctgcctcagcctcctgagtagctgagtagcctcctgaggcgtgtgccaccacacccatctaatttttgtatttttagtagagatggggttttgcaatattggtcaggctggtyttgaaytccgaaccttgtgatctgcctgccttggcctcccaaagtgctgggattacaggcgtgagccatcgtgcctggcctaaaccaggcctttttaaagaataggatcagaggtctggtttcttcttcttagcaaggtcttgttttcctggtaaggccttgttttctgcttagaggcatcactacaaccagcctgtcat

SEQ ID NO: 1225 - DNA, 401 bp, Homo sapiens
cttgctctgtcgcccaggctggagtgcaatgatgtgatcttggctcactacagcctccgcctccctggttcaagtgattctcctgcctcagcctcctgagtagctgagtagcctcctgaggcgtgtgccaccacacccatctaatttttgtatttttagtagagatggggttttgcaatattggtcaggctggtyttgaaytccgaaccttgtgatctgcctgccttggcctcccaaagtgctgggattacaggcgtgagccatcgtgcctggcctaaaccaggcctttttaaagaataggatcagaggtctggtttcttcttcttagcaaggtcttgttttcctggtaaggccttgttttctgcttagaggcatcactacaaccagcctgtcatctgtga

SEQ ID NO: 1226 - DNA, 401 bp, Homo sapiens
gttttctgcttagaggcatcactacaaccagcctgtcatctgtgaactcttcccttggtgggattcagaagtgtagctcctgcatatgtctctccattatgggagtcactggattctgtggttatttaattagaacatgcctcactaggtgttggctacacctatttgagctgaactagaaatgcaaattcctgctacacrtattttgcattacaaagtgttctactttttgaaagcttttgagtaaatggcaaatctcaactgaagactttgactcttctacaggaactgcatggaaatgtgaggaaccgaattggaagaatgaacacagcctaccatttggttttcaatgctttgatttttaggtggctttgtagtaatggatggaaagaacaaagatc

SEQ ID NO: 1227 - DNA, 401 bp, Homo sapiens
tcaactgaagactttgactcttctacaggaactgcatggaaatgtgaggaaccgaattggaagaatgaacacagcctaccatttggttttcaatgctttgatttttaggtggctttgtagtaatggatggaaagaacaaagatctgtattaaacacatgcttgcagcgtctacaaaaatggtttatgttttaaaagaagcrggggaagacctcagtcattctgagttattacagctccaggagatggaagtgttttattagcccatatatatatagatagatacagtgctaccaggaaaaaactaatgaattataactaaggtcctwtgtatggaccttaatattccttgtgtctgacgatgcaggaatttagccaggcaagctgagataaggccctaacc

SEQ ID NO: 1228 - DNA, 401 bp, Homo sapiens
atggaaagaacaaagatctgtattaaacacatgcttgcagcgtctacaaaaatggtttatgttttaaaagaagcrggggaagacctcagtcattctgagttattacagctccaggagatggaagtgttttattagcccatatatatatagatagatacagtgctaccaggaaaaaactaatgaattataactaaggtcctwtgtatggaccttaatattccttgtgtctgacgatgcaggaatttagccaggcaagctgagataaggccctaacctttgctctacttttctttttatgatcttyttccacatgcccttttttggtttaaatataaccaagatgatttccattagatttttctaacaactgcatgatgtgtgtgcgtgcgtgtgtgcatgtg

SEQ ID NO: 1229 - DNA, 401 bp, Homo sapiens
tacagctccaggagatggaagtgttttattagcccatatatatatagatagatacagtgctaccaggaaaaaactaatgaattataactaaggtcctwtgtatggaccttaatattccttgtgtctgacgatgcaggaatttagccaggcaagctgagataaggccctaacctttgctctacttttctttttatgatcttyttccacatgcccttttttggtttaaatataaccaagatgatttccattagatttttctaacaactgcatgatgtgtgtgcgtgcgtgtgtgcatgtgtgtgtgtgcatgtgcgtgtgtgtgtgtgtgtgtgtgcatagcagcaaagccagatgatgatagcaggatgcagaaccccaattttttttaatattatgtaatg

SEQ ID NO: 1230 - DNA, 401 bp, Homo sapiens
tttgcttccttcccattgaacaacattaggttgaaagccaacagtagaaaaacaggtgcttgttatgtttgagtgtggagccccaaaaatggaaaaagaagaaaaagaaaaagcaccgggttttagggaaggcttctttaggcataatgtaaagttaatttatcattttggccctgttccactaaagacacagaatttgcrgcaatactacctccccatggcctatttctctgaactaaaatgtacattttctttagagaagcaagaactattatgaccagctagtcctggttttgggtggcgggggtggcaagaaaaaaaaggaaatcgttttctttaagtaaagcacttaaaattatatgtttttttgaaactggttttattcctgttcagattggtca

SEQ ID NO: 1231 - DNA, 401 bp, Homo sapiens
ttagattattagctaaaagcagatattcttagtgatacagaatatcattctagttttacaatataaagacatgttttgaaaaacctaaaatcattatatttttgcatttttaaattttaaatataaatataagcatatatttaaacaagtacatatataatatccatttaaacatgcatattaaaaacctgaaaatacaarggattgtgtaatgaatctccatgtagccatcacccacttcagccgttatcagttttgtttcatcttcatcccagtcatttcccttctctcttactattttatagcaaatcccagacatcttatcatttaatgtataaatatttcagtatgtatctctaaaagataaggactcttctatttttaaatatatccataacatg

SEQ ID NO: 1232 - DNA, 401 bp, Homo sapiens
ccctagctccctttgtctcttttttctacgtttaacttttttttaaagaaaccaggttgtttgtcctgtaaagttctctgggttttattgcatcccctcttgatgccacttaatttagtccctgttggttacatgtatgtggatgtttgattaaattcaggtttgatttttaaagataatactgaatagttttacaaaaaytgactttctaatttcatcaaaggttgattcggtatccattgaaatgaccatatgacttttatttgttgatgtgccatgatgtttttttttaaatttgttgaataagataatgaatttaccttatgatttctctcttttgacctttcagctactttcatttctaagtgggctttagttggtgaataaattaacatgtcatt

SEQ ID NO: 1233 - DNA, 401 bp, Homo sapiens
aataactgaatccttgattcttgttggatgttcagtcctctttgttttgatttgttttgcttggtacgaaagatttgactagtttggaaagtgacaggttaacattttctacattgacttgaccttcttccacccaaaatgatcctggtagaaaatgcagagtatagtaaagaatgtgtgccttccacatttagcctggtraggtctataaatatatcaaattaagccagtcagatggcctgctgatatttgctttgcaggctagacggattgtactcctttagaatctaagtattgatggaaaaagattcaagggacagcttgaaagtttgtggactccggctatggaaattttatactcatataaaactgtcagtgattagtagaaaatatgtagcaga

SEQ ID NO: 1234 - DNA, 401 bp, Homo sapiens
attttgttttatcaggagaaacacccaaaggtcacttttcattctgctgaataggaagaaatgatatcagggtctgcccagaaagcttgtaagggagaaaggaatcttacccacttaggaagcattttctaattcacttatgtgaccttgggcagccttcccctgtgcacttttgtgaattcttagctagaggtattttaytaaagactgcagaactattcttttgagatgatctgtatcctcctttaaaatataggataaactataaaatgtgctaagatccttgatagtcctatcattctatatatgtttgaacaatgccaaagcccaagttcatcagttaaaccagttaatctccattggcccttggtgtcaacttgttctttggacaaagtgtcacc

SEQ ID NO: 1235 - DNA, 401 bp, Homo sapiens
ttctatatatgtttgaacaatgccaaagcccaagttcatcagttaaaccagttaatctccattggcccttggtgtcaacttgttctttggacaaagtgtcaccttgtaggaagtctacaaacctctaagtgctcccagcgtattagctaagtcctgagctccatggagttggatgccctaattctgctttagaaagtcctrgttccattaaccgtctcctgagaattctcctggcttccctttttgtttcttgagcagagttcagtcaaggagaggtcaagagagatgatacattacttccagtcactgtattggctctgggaacctccaactctatgcaggttctttgatctcctctggccactttctttctttttcaagtacatatttgctattcagca

SEQ ID NO: 1236 - DNA, 401 bp, Homo sapiens
ctaattgcaaaggagctatattcagagcaagaataataatttcagattttttaactggacttcaaagagcaggaaagtatgcagattcctaaacacataagcattgaagatattacaggtaaggttaaaaaaaatctgtaattttgtagtgactagcagtttaatattcaaacatttaaaatgtgcatattttattaagcmaatggcgtagagttatttggtttaattttctgtaagtaactcgtaaagaattgtcctaaaagctgtgggtgaggactaattcattcaagggaaacaggatctaatgattgcyttgtgaggtatatatacactgtatactcatgctaattcctgctaattgtcaaagaagaatagtggctttttatcagcagtttgcattt

SEQ ID NO: 1237 - DNA, 401 bp, Homo sapiens
ttacaggtaaggttaaaaaaaatctgtaattttgtagtgactagcagtttaatattcaaacatttaaaatgtgcatattttattaagcmaatggcgtagagttatttggtttaattttctgtaagtaactcgtaaagaattgtcctaaaagctgtgggtgaggactaattcattcaagggaaacaggatctaatgattgcyttgtgaggtatatatacactgtatactcatgctaattcctgctaattgtcaaagaagaatagtggctttttatcagcagtttgcatttgtgtaatggtcctggtctactggttttgtctacttcactgataaggaaaacaccacttaaaacaagcaagaaaagcaagccatcctttacagtattattttctttttagcct

SEQ ID NO: 1238 - DNA, 401 bp, Homo sapiens
actgcactccagcctggcaacagagctagactccatctcaaaaaaaaaaaaaaaaaaaaaaaaaaaaaacaattgtggaaggaggtgaggaaggaaggacggaaataaggaaggagggaaagaaggaaggaaggaaagaaagaagggagggaggggcaggctgaaaggaagaaagaagaagggcatgaaggaaggagggaktccttttgtgtggtaaaggatttttggaacctctaaatgataatagtagtcccccagttctcagctatttcagagaactgtccagcttccccagcaatgatcatttgtcctgaccttttttgccaaggcaaaccaggtctagagtaaaatactacaaaatacattctctggtattaaaaaggaatggccaaaaccgtaat

SEQ ID NO: 1239 - DNA, 401 bp, Homo sapiens
cagagttcctctgcaggactgcgtggtgacagcacaccacaggtggcccattcagcactgtcatctgggacagcaaggataccctgctccatttgtcatcctatggaattctgtcagcagttgaaagcctttcagcacaaaacctttaacattcgaggcaaacttcctaattttttttttttttttttttttttttttgaracagagtttctctctgtcacccaggcttsagtgcggcagtgcaatctcggctcactgcaaccaccacctcccaggttcaagcgattctcctgcctcaacctcctgagtagttgggattacaggggcacgccaccatgcttagctaatttttgtatttttagtaragacggggtttcaccatgttggtcaggctggtcgca

SEQ ID NO: 1240 - DNA, 401 bp, Homo sapiens
cagcacaccacaggtggcccattcagcactgtcatctgggacagcaaggataccctgctccatttgtcatcctatggaattctgtcagcagttgaaagcctttcagcacaaaacctttaacattcgaggcaaacttcctaattttttttttttttttttttttttttttgaracagagtttctctctgtcacccaggcttsagtgcggcagtgcaatctcggctcactgcaaccaccacctcccaggttcaagcgattctcctgcctcaacctcctgagtagttgggattacaggggcacgccaccatgcttagctaatttttgtatttttagtaragacggggtttcaccatgttggtcaggctggtcgcaaactcctgacctcatgatcctcccatctc

SEQ ID NO: 1241 - DNA, 401 bp, Homo sapiens
tcctaattttttttttttttttttttttttttttgaracagagtttctctctgtcacccaggcttsagtgcggcagtgcaatctcggctcactgcaaccaccacctcccaggttcaagcgattctcctgcctcaacctcctgagtagttgggattacaggggcacgccaccatgcttagctaatttttgtatttttagtaragacggggtttcaccatgttggtcaggctggtcgcaaactcctgacctcatgatcctcccatctcggcctcccaaagtgctgggattacaggcgtgatccaccgtacccagcccatttcctgatatttttaaaggcaattgccgtggatgaaaatattaatacatagcacctaaataagtagttttttacatgaaaggat

SEQ ID NO: 1242 - DNA, 401 bp, Homo sapiens
cctggaaaagatgccttgaaatgtattttgaaaatagctttttgttggagtaataaaaaattagtccaattcttatttatccatagtaatgattccagaataacatgcacatccttaggaataaagttctcctttaaaaaaataaataaatagcatacatctttgaagtccccagatttccattgtcaagatttttctctyttatacatacccaaattaagagccttccctgcttgcccattaatatttgctattattcattgaatgccaatttttttttgccaattcctttatctagattatttataacctctacagaattctgtaagagtgccattacccctcttttcttaatgggaatattgagcatctgagtggttaaatgacttattcaaagccag

SEQ ID NO: 1243 - DNA, 401 bp, Homo sapiens
atttttttttttttcctaaaagagtatatagaatctgtactggcttgatatactggttttgcttttcatcctgaaaatatcattgataaacattgtgtatattagactatttttggttgggactgagtattgcccatggtgttcccaatgatatgagaagaaacatcctggtactaaatgccctggtggcctggggctgaragctttggctttgtataattcatgcacccactttcatgtaacatgaagtttgacaagtgaatattaagttcattatatgaaggtgttgcaaaccaaacttgaaacttatttctacctctcattctaaatggagatattttgtagtgctttagtctacatttacagtgatattagactctttccatttccttaaaagtatg

SEQ ID NO: 1244 - DNA, 401 bp, Homo sapiens
gacagcagtgttctttcatttgtctatagatatatctagaatagcactgtctttccaatgacctgaaggagttgatgcaccattaagaagtatccaatttaggcctgggcacagtggctcacgcctgtaatcccagcactttgggaggccgaggcgggcagatcacgaggtcaggagattgagaccatcctggctaacacygtgaaaccccgtctctactaaaaatgcaaaaaaaaattagctgggcgtggtggcacacgcctgtagtcccagctactcgggaggctgaggcaggagaatggcgtgaacctgggaggtggagcttgcagtgagccgagattgcaccactgcactccagcctgggtgacagagcgagactccgtcccaaaaaataaaaaaaa

SEQ ID NO: 1245 - DNA, 401 bp, Homo sapiens
aaaggcaccagaaatagtcaacaaagccatgtcccttttacatcacagaaatactatataaatatttaggtgccaattctaataaaatcttaattatatttataagtaaggaagtgcatcttaaaaaacatatgttttaaagacaaaaaaagcaacgatcgaaaatgccattttgtaggccatgttttgctgctctctgarctgtggtagattgggcgtgtctgtagcgtgcctgatgggacctcatggctctgaacaagcaccttccagaacttctcctttgttgcactctaaagctcttctttgaaaaaagtagatacagtgccaagacaagtgttggtggttgtatagctgattttatcaaagacagacaatttgtaaaagtaaatgtaatctgttag

SEQ ID NO: 1246 - DNA, 401 bp, Homo sapiens
tgctgacttgctgtgaatacagcacaaatatgagacatccccatatttatcatagcaaattgggatgaaccaggtttttagtttgtaaggttttctctgatcaaaatagaaaatgccagaagctgagaattgtaatctataaaatatgaggttcatttgttatatggggaaaccttgttattttttcctaatcttaagcawacagtgtaattgtattttaataaatctccttgaaaaagcatttaaattataggtccttaaattcttctcctttttaaacagtgtacccatattatctatgtctcatatttttacttcttcagaaaagcatctgagaccactatattttaattatagtaatgaaatatgatcatttttcatcatcacttagcaaagattta

SEQ ID NO: 1247 - DNA, 401 bp, Homo sapiens
aaaagcatctgagaccactatattttaattatagtaatgaaatatgatcatttttcatcatcacttagcaaagatttacaagctgagtgagtgcatatgatagtttctgcatacctctaaggaaccagggcagttcttttccacatattaatttcagctattctttagccctcccacgtccaatacaaaacatgcaatcgsgtaagtgctgttcagttttttcattttaatattgtgccaacaactgcaatttttcttcactcaacacagtttctcattaaatcttaagcctaatccagtagtaaaaacgtgctatattttaaaaatcttgaagtgaaacatttgttactcttctgataattattaaagccccaagccatcctctgagctaattgtctagt

SEQ ID NO: 1248 - DNA, 401 bp, Homo sapiens
cagttttttcattttaatattgtgccaacaactgcaatttttcttcactcaacacagtttctcattaaatcttaagcctaatccagtagtaaaaacgtgctatattttaaaaatcttgaagtgaaacatttgttactcttctgataattattaaagccccaagccatcctctgagctaattgtctagtggatcattcttgycttctagttctaagaaattacaccttttttttttttgtaattaggatcttttaggtaagttatttaaattattactggatcttatcagaaagaaaatctttgacatctatgattttgataacttccccctcctttgagatggtgactttattcacatattaaagcaagccaraaccttgagggaagaattggagagtata

SEQ ID NO: 1249 - DNA, 401 bp, Homo sapiens
gagctaattgtctagtggatcattcttgycttctagttctaagaaattacaccttttttttttttgtaattaggatcttttaggtaagttatttaaattattactggatcttatcagaaagaaaatctttgacatctatgattttgataacttccccctcctttgagatggtgactttattcacatattaaagcaagccaraaccttgagggaagaattggagagtatattttacatccaaaatacttcaaacctttctcgttacatgaaactgtttttatttttttaaatcctgtatgtaaaatatgtatagcattaaaaataatcactagtcagaatttaaacaaagacataatatactaggtcttatgataatacattgttcactagaccacttgaat

SEQ ID NO: 1250 - DNA, 401 bp, Homo sapiens
cgaatggattaaacatattaacagtgaaaaacttctctgaggagaggtttccggattgcttggacctcctcctggggactgtgtgggaatttcagtggtagttctcatcttttatattttgtttctctacagtaatttaaaatttattctgtggaaaaaatagttactattccagattataaaaagatgagaaaagaatcmttccwttttgtaccctctgatgctttatgtagtcctgtggttcaaagaaacaagacacatgaaatcaaacatgaaattgtccagatttcctcttgcatcttttctctattcttgtgtatctgttcttctgaacagtttcagtggagaactactttggaagatgttgatgtgattttttttaatctaaaaattattttata

SEQ ID NO: 1251 - DNA, 401 bp, Homo sapiens
ggattaaacatattaacagtgaaaaacttctctgaggagaggtttccggattgcttggacctcctcctggggactgtgtgggaatttcagtggtagttctcatcttttatattttgtttctctacagtaatttaaaatttattctgtggaaaaaatagttactattccagattataaaaagatgagaaaagaatcmttccwttttgtaccctctgatgctttatgtagtcctgtggttcaaagaaacaagacacatgaaatcaaacatgaaattgtccagatttcctcttgcatcttttctctattcttgtgtatctgttcttctgaacagtttcagtggagaactactttggaagatgttgatgtgattttttttaatctaaaaattattttatatcagg

SEQ ID NO: 1252 - DNA, 401 bp, Homo sapiens
cagggagtcagtgaaattaaatgagttcatttctgctaaagtacttttaactctggggaagcaaaatttatttttccttataataaaaagtaaatggtagtattacattctctcagtagacattggaaaaatatatacacctgttttaacagactgtgttatcatgtttaatttctttttttttttttttttttttttgaratggagtttcatgctcttgttgcccaggctggagtgcaatggtgcagtctcagctcactgaaacctctgcctcccaggttcaagcgattctcctgcttcagcctcccaagtagctgggattacagacatgcaccaccatgcccagctgattttttgtatttagtagcgacagggtttcaccacgttggtcaggctggcct

SEQ ID NO: 1253 - DNA, 401 bp, Homo sapiens
acaaaaaacaaactaaatttggaaagatggaaggtatctgtaaacatagacttttataattttgtataatgaatgtttatgaagccatgtagggccttattatattatacattattataagagacaggtatgaaaaacataactatgggagacaaaatcacagcaaatataatactttaagtttgatagataaaatatttrtcaaacgtatttgataatatatataatgtaaatgaaatatttatcaaattatgcctgaggtcgcaatttttttaatttttgcaatcagaccttggcaatgaccttgagcagtagggtattaaaatcttccacaggcttagcgtcccaataatggaacactaagcataaatggattaacatttgtttatagaacagctatt

SEQ ID NO: 1254 - DNA, 401 bp, Homo sapiens
taacagaatgaggttcatcttggaaaaatgcagactaatagtaacaatacctttgggaaagaataatctacaacacagatactcagccagtgagtgggcgagttctgggcagaatgctgagctggctaagaggtgagaaaagtcaatgtttgcaacacgatactgtaggaaaacagaccagcatagttggagctggcgtaracactgccacctcgagtttacacagagagagagcaaaggctttggtgtctgatactttctcaccaatattccttgatagagatttgttgatatttctatcatttaatatttgtaaacataggcatcaaataatttcaaataccacagctagtattgaggaaaagcagacagataatagggacttttcatttttcgacaag

SEQ ID NO: 1255 - DNA, 401 bp, Homo sapiens
ttctatcatttaatatttgtaaacataggcatcaaataatttcaaataccacagctagtattgaggaaaagcagacagataatagggacttttcatttttcgacaaggtattttttaaattgtccaaatatttcactgtggaatgatgactagagagagaggaaatatcagctgtatttttttttcttcctcttgttcctratcaagggagggtttgatgaaaatgaagctgagaagagaaaggatgtctaaggatggtttataaattgaccataaatgtgtggtttataaaattagccaaccctaactagaagtttcttggggtccgtgaatatctataaaaacgtctagaatctccaccaagaaaaaatggaaaataatttattcaattggaatataaa

SEQ ID NO: 1256 - DNA, 401 bp, Homo sapiens
tattatgagccaggcattgtgctaggcattagagatacaaaatgatcagaatgtgatcattgtctgacagaatgtgatcagtgtgtcacagatcatcacaatacagataagtgcagtgaaagaggtcaggatagggtgcaatacaaaaggcaaggagagaattctccccagagcatagaagtgggtgatggggaggtggargacagggaaagagtgatgcctaagttcagaaaaaactgtgaattttcaccccattaataacaaatatagaacaaacatgatcatgttaagagcaaatactaaaatttttaaaaaccctgatttccatcttctaatctgattaatgaaacgaatggtatatacatacacacacacacacacacacacatatgtatatatat

SEQ ID NO: 1257 - DNA, 401 bp, Homo sapiens
acatagtgagaatcaatgatcagtggcaaatagggtcatgccaaagggaaattgacagctctccgggccatgctgcctcttattccacatttcaacttcactctagttaaatttcagttaaccaatcatttgaagactgaagcaaacaacaacaaaaatctgtaacccacagttttcgtgggacatggttttctaaatgtygtgtcttttcttttctttatattgcttggtaccagatcatttttaggaatctccatattccataggaggaaaattgccagtctgaaagctcagtgtctttagcattttttttttgcttaccacatttttgccctctaggtgccaacctggattcactggagcaagatgtactgagaatgtgcccatgaaagtccaaaacc

SEQ ID NO: 1258 - DNA, 401 bp, Homo sapiens
tttttaagtttattaacataaaacttacattattcagacttgatacagtgattctggtcagaatgtccaatgagccatttactgatttataaaaactgacttaaaatatgaaagagagggacaaatgtatattttataaggcagtcatttgccttgaaataaaacattatatttatagtactttctaggaaaatattgtcraggttagtcagcttcaaatttgacctaacttgacacagaattcctagttgaaaaaaattgtgttcatcsatatgtggtgtgtggggggtgtgtgtgtgttcrtgtgtgtgtccacacgtatgtgtgtgtatacaggcactccataatcaatgtacagattttagggaggaaaaaagaaaaagcacccacactttcaatag

SEQ ID NO: 1259 - DNA, 401 bp, Homo sapiens
atgagccatttactgatttataaaaactgacttaaaatatgaaagagagggacaaatgtatattttataaggcagtcatttgccttgaaataaaacattatatttatagtactttctaggaaaatattgtcraggttagtcagcttcaaatttgacctaacttgacacagaattcctagttgaaaaaaattgtgttcatcsatatgtggtgtgtggggggtgtgtgtgtgttcrtgtgtgtgtccacacgtatgtgtgtgtatacaggcactccataatcaatgtacagattttagggaggaaaaaagaaaaagcacccacactttcaatagttaggggcagtacagagcaggtatgtcatatataaactaacataataggacctaattatagaatagctc

SEQ ID NO: 1260 - DNA, 401 bp, Homo sapiens
aaaatatgaaagagagggacaaatgtatattttataaggcagtcatttgccttgaaataaaacattatatttatagtactttctaggaaaatattgtcraggttagtcagcttcaaatttgacctaacttgacacagaattcctagttgaaaaaaattgtgttcatcsatatgtggtgtgtggggggtgtgtgtgtgttcrtgtgtgtgtccacacgtatgtgtgtgtatacaggcactccataatcaatgtacagattttagggaggaaaaaagaaaaagcacccacactttcaatagttaggggcagtacagagcaggtatgtcatatataaactaacataataggacctaattatagaatagctcaaatttagaatattttaaaagattgtaatttta

SEQ ID NO: 1261 - DNA, 401 bp, Homo sapiens
aaattattatatatagtgcttcccattatccttgttatgcaatgtactttttgatatatgtgtttgtgtgcatatatgtgtgtgtgtatatatatatatatatatatatatactttaaaaaatctggggagctttatttccttaaagggcagcaagtttttaagttttcaagtatccccggagcttacagagtttttctgrctagttaacgagaatacagtaaatggcccagggtacatctcttgatgtgtytgctacccaagctgttaaacccttctgctgtttgccaacatatttcacgtctcctttactccccaggcatgcccagtgaggcatgtgtttgcataagaaatattttgttaatgaaaaattaacatgtccaaagtcactaaaaagttcca

SEQ ID NO: 1262 - DNA, 401 bp, Homo sapiens
tgatatatgtgtttgtgtgcatatatgtgtgtgtgtatatatatatatatatatatatatactttaaaaaatctggggagctttatttccttaaagggcagcaagtttttaagttttcaagtatccccggagcttacagagtttttctgrctagttaacgagaatacagtaaatggcccagggtacatctcttgatgtgtytgctacccaagctgttaaacccttctgctgtttgccaacatatttcacgtctcctttactccccaggcatgcccagtgaggcatgtgtttgcataagaaatattttgttaatgaaaaattaacatgtccaaagtcactaaaaagttccacggcagaggcaggacccaaaaccaagatgattccagcacactcatctcctg

SEQ ID NO: 1263 - DNA, 401 bp, Homo sapiens
taaagacacagtgtgctggtattttgcacacctcataaaaagagacgttccctatgtgaactcacagaggcgtacctgagcactgcttcttaaccacacaccatttgtctggttcaatgtgcatgcacagagagccataatagtcatgtgtaatgtgttttggagtgcagtgtattgctcttttctgaaactttttccctwtctttcttttttttgtcaactttctgcattggcagagcatcttgggattgaatttatgggtatggaccaatcatcattccttttagcctgcagaatttagagcctatgagctgaaatctttttcccttcctactcttacctttcagttcctaactaatttcctttttctttagaagggatcatacagctataacaatgat

SEQ ID NO: 1264 - DNA, 401 bp, Homo sapiens
cctttgtgcctcgcagaacatctccaaagagggagaaacacaagggggagcacctctattactagggagcacgttgtgtactgaggggagctatctattggagtttcttccctcagggaaaaaaaaaattgtcccacttatgaaatggattattggcctatcctgcagggagggaaaaaattctaccattaccccaaaccmttctatccttaacagcatatttctcatttttatagctggagggtctgactatagaatgtattgtttctgtccccaacagtaaagtgaaagacagttgagatatataacttccccctcagtaagatcttctatgggttagaaaagacacagggggctgctatccgcatgcttctcaaaggtacagtttccagaggctcata

SEQ ID NO: 1265 - DNA, 401 bp, Homo sapiens
atcacagcccagggagctgtgctctgcatcctgggtcccagggagagaaggaccagtggggtgacagctttgcttcttagacatgtatcctaaaacctgatcaggataccaagatcaggaagagaggctacagcagcagcttcaaccagataacaccccatagaaattaattccctgtcctgtggctatgggggaggggargcagcagacatatgcaattaacatataagcactcacattccatgtcctcatctgacttttgctgcacacaaaatccgtgataccaactcaatatctcctggtacattgtttcaccgcaatgcaccagccgcttcgctttctaattgtggcttccacatgactgctagattaggagttatgctgtatggaatgacccttcc

SEQ ID NO: 1266 - DNA, 401 bp, Homo sapiens
aacatataagcactcacattccatgtcctcatctgacttttgctgcacacaaaatccgtgataccaactcaatatctcctggtacattgtttcaccgcaatgcaccagccgcttcgctttctaattgtggcttccacatgactgctagattaggagttatgctgtatggaatgacccttccaactttgcatccaccttttmttcccacccaagcatttcctccctctggttttcttttctttctttatttttcctcccttagtatcaggcatgctgtgccagggacttcagatggctccttaacttttaacctwgttttcccttcctcggtctctctgtcattctgtcagtctgtckgtcctcttggtttgtttttcctttccacctccaacccttttgat

SEQ ID NO: 1267 - DNA, 401 bp, Homo sapiens
tcgctttctaattgtggcttccacatgactgctagattaggagttatgctgtatggaatgacccttccaactttgcatccaccttttmttcccacccaagcatttcctccctctggttttcttttctttctttatttttcctcccttagtatcaggcatgctgtgccagggacttcagatggctccttaacttttaacctwgttttcccttcctcggtctctctgtcattctgtcagtctgtckgtcctcttggtttgtttttcctttccacctccaacccttttgatttgtttttgtatactctatgcagcattctagtcctttacccackgacttctcttttccttctcctcctgttaataatcagtgctatattaatttgatttgacaatgttcttga

SEQ ID NO: 1268 - DNA, 401 bp, Homo sapiens
ttatgctgtatggaatgacccttccaactttgcatccaccttttmttcccacccaagcatttcctccctctggttttcttttctttctttatttttcctcccttagtatcaggcatgctgtgccagggacttcagatggctccttaacttttaacctwgttttcccttcctcggtctctctgtcattctgtcagtctgtckgtcctcttggtttgtttttcctttccacctccaacccttttgatttgtttttgtatactctatgcagcattctagtcctttacccackgacttctcttttccttctcctcctgttaataatcagtgctatattaatttgatttgacaatgttcttgacctgtttactggaatttgattatcatgggctcggcttgtagga

SEQ ID NO: 1269 - DNA, 401 bp, Homo sapiens
ttatttttcctcccttagtatcaggcatgctgtgccagggacttcagatggctccttaacttttaacctwgttttcccttcctcggtctctctgtcattctgtcagtctgtckgtcctcttggtttgtttttcctttccacctccaacccttttgatttgtttttgtatactctatgcagcattctagtcctttacccackgacttctcttttccttctcctcctgttaataatcagtgctatattaatttgatttgacaatgttcttgacctgtttactggaatttgattatcatgggctcggcttgtaggaaatgttttgtttcatgataaggtccactgtatcctagaaattaaaattcactttttcatttcaagaaaacttcctgcaagctgccctc

SEQ ID NO: 1270 - DNA, 401 bp, Homo sapiens
tgtactggtgacttctttggacaaataaaacttgttcctaagtacaattggtggagtagttagaattgtcttccaaaggacaagtcaccatttgggcccataactgtcctacccatcacataggattttctttgatacagtgccctgctacctcatattgtattgcttcttgtgttcacattttactgttaaatcacagasagcctgactcaatttactagttaactacaagccaagttcatgtttgcaaatgtctttgaatttaatatatttaagttagaaatgactctttgtaaagaccactggatataaagtgatgatataaaatatctgggaaatacaaaaaggccaggggctgggggataaagaggggaggaaggaggaagtggggggcgcccagt

SEQ ID NO: 1271 - DNA, 401 bp, Homo sapiens
gaccactggatataaagtgatgatataaaatatctgggaaatacaaaaaggccaggggctgggggataaagaggggaggaaggaggaagtggggggcgcccagtgatgccaattccatctcctttaattggtgttgattcctgttgtctttgcaagagctttttatattttattttgcaagagactacaaaaaaaaataawactacagagttttaaccaaatagttattttataattaatgtttatgatttccaatttactatcaactatatatatctctatagcttataattagaagtaatttctgagtataatatttgtattgtaaatggccccagctggcttttttatatttatgttcaaagcatagtgcagagcatgttgtaccttagctatgtgtg

SEQ ID NO: 1272 - DNA, 401 bp, Homo sapiens
tcagtcctggcaagtggaagtgacctgtgatgacatctgctctcatccctttccagaggcggaggagctgtaccagaagagagtgctgaccataaccggcatctgcatcgccctccttgtggtcggcatcatgtgtgtggtggcctactgcaaaaccaagtaaaccttctttctccatgcctttctctctccttcatgcaragacagcttagatggccagggctttgcagaatctgagctccacagcctagtcttggggataaaaaaaaaaggaggggcagggggagattatttcctctgaataatccattttgaggatgtctcctaaacacagaaatagaaagctgtttgcctattcatgtaaagatttctgttcaatgaccacagcccctgagtggata

SEQ ID NO: 1273 - DNA, 401 bp, Homo sapiens
aatgaaatcccaggatcactagatccttccacttttaaagaagctatagtttcccagagttaagttcccaccgtcactgatctctttagctttttgctccttcctttcaggaattcaaaggaagaatgtggtctccaggggcattcccagccctaccatctcccctctgggtgccctccttcactgcagttcaccctgtaractttattcacatcaccaccaaggtgattccctgacaatgtgaacctcagtgagaggtgaacagagaggactccctgctcctcctctttcagacccaggagctgtctttagccccattctgaagaccacccttttcctgtatttccatccgggctttggtcaagtaagcattcctaaatcccttagagatgagggctctt

SEQ ID NO: 1274 - DNA, 401 bp, Homo sapiens
caaggtgattccctgacaatgtgaacctcagtgagaggtgaacagagaggactccctgctcctcctctttcagacccaggagctgtctttagccccattctgaagaccacccttttcctgtatttccatccgggctttggtcaagtaagcattcctaaatcccttagagatgagggctcttctcctttctgggtctagggstacatcattttgccttcaggtttgaattsctgttccttcagcctcatttctcactgattgcactgttttccctggagatggctttgaggacatcctggaggagccgtgctggggtgtcagcctgccaccctcccctgggcagctgccctgcctgccttcttaacctcacgttggactttcctgttttctctccctttcat

SEQ ID NO: 1275 - DNA, 401 bp, Homo sapiens
agtgagaggtgaacagagaggactccctgctcctcctctttcagacccaggagctgtctttagccccattctgaagaccacccttttcctgtatttccatccgggctttggtcaagtaagcattcctaaatcccttagagatgagggctcttctcctttctgggtctagggstacatcattttgccttcaggtttgaattsctgttccttcagcctcatttctcactgattgcactgttttccctggagatggctttgaggacatcctggaggagccgtgctggggtgtcagcctgccaccctcccctgggcagctgccctgcctgccttcttaacctcacgttggactttcctgttttctctccctttcattcatctttgccaagagatgattcttttaa

SEQ ID NO: 1276 - DNA, 401 bp, Homo sapiens
tttgccaagagatgattcttttaacaccctgactctggatcaaattgttttctatctcctgaagcttctcttcatttgagcttctcttcacttttgactttttttgctcatcgctatttgaaaacggagctatttctacttctttgaattctgaatgttcttctaagggatccaaataaccatcaacatgtaagaaaagckgtctckgtctttctctgagttcttctctaatcactgagagaactataggatatacacagtcatctttgaaaaacccatctcttgggtagtctyttgacctcccagtccctttgtaggaacatctctgctgaagcctgtccctagcatagacaggctgttcttgctttagagcctgaaatgtgtgcgtctcttttccttga

SEQ ID NO: 1277 - DNA, 401 bp, Homo sapiens
aagagatgattcttttaacaccctgactctggatcaaattgttttctatctcctgaagcttctcttcatttgagcttctcttcacttttgactttttttgctcatcgctatttgaaaacggagctatttctacttctttgaattctgaatgttcttctaagggatccaaataaccatcaacatgtaagaaaagckgtctckgtctttctctgagttcttctctaatcactgagagaactataggatatacacagtcatctttgaaaaacccatctcttgggtagtctyttgacctcccagtccctttgtaggaacatctctgctgaagcctgtccctagcatagacaggctgttcttgctttagagcctgaaatgtgtgcgtctcttttccttgactcaga

SEQ ID NO: 1278 - DNA, 401 bp, Homo sapiens
ttgactttttttgctcatcgctatttgaaaacggagctatttctacttctttgaattctgaatgttcttctaagggatccaaataaccatcaacatgtaagaaaagckgtctckgtctttctctgagttcttctctaatcactgagagaactataggatatacacagtcatctttgaaaaacccatctcttgggtagtctyttgacctcccagtccctttgtaggaacatctctgctgaagcctgtccctagcatagacaggctgttcttgctttagagcctgaaatgtgtgcgtctcttttccttgactcagaagaaatgaatttaagagatacatattgttttaatcaaaaactttttttcatttaaccagtaatacagatagtttcaagctatcatcc

SEQ ID NO: 1279 - DNA, 401 bp, Homo sapiens
tcagtttgtataacttctattgctctatctttaaatttactaattttctcttttacagtatctaatcagctgataattctgtctagcatgctgataattctatccatggaattttttttattttcataatttttagctgtaaaagttctgttttattctttttcaatcttctatttttctcattagtttcatggttattcytctaaatctatcaacatatttatgaaagcaattgtaaagtctactaaattgatcatgtctgttatttctggatctatttctgccatgaatatttctccaggttatactgaacatttttctttacatacctcaacatttttgtttggatgttgaatattaaattatcaggtctagattttgttgtcttctccttaaagaac

SEQ ID NO: 1280 - DNA, 401 bp, Homo sapiens
ctccaggttatactgaacatttttctttacatacctcaacatttttgtttggatgttgaatattaaattatcaggtctagattttgttgtcttctccttaaagaacattgaacaattttgttttggcagatacttaagtaatttgcaaatcaacttgatcctttcaagtctacttttaaaattttgttaggtcagatctaragtarcctttaccttagagttggttcagctctaatactaagatatgattcttctggagtctctcctgaatatctgagtttctaatgcattgtctctaagaactttaatgtctcccaaccctgtgtaagctctaggaatttgtcagattaaaactcaccagtagttttggcatactatgtatgacagtttcacccacacat

SEQ ID NO: 1281 - DNA, 401 bp, Homo sapiens
ggttatactgaacatttttctttacatacctcaacatttttgtttggatgttgaatattaaattatcaggtctagattttgttgtcttctccttaaagaacattgaacaattttgttttggcagatacttaagtaatttgcaaatcaacttgatcctttcaagtctacttttaaaattttgttaggtcagatctaragtarcctttaccttagagttggttcagctctaatactaagatatgattcttctggagtctctcctgaatatctgagtttctaatgcattgtctctaagaactttaatgtctcccaaccctgtgtaagctctaggaatttgtcagattaaaactcaccagtagttttggcatactatgtatgacagtttcacccacacatgtcca

SEQ ID NO: 1282 - DNA, 401 bp, Homo sapiens
ctgagtttctaatgcattgtctctaagaactttaatgtctcccaaccctgtgtaagctctaggaatttgtcagattaaaactcaccagtagttttggcatactatgtatgacagtttcacccacacatgtccagtgtactacgggcatcaggtcaagtggacttagatgcagagttctgaagttctacttctgtatacgtktctctcctcaggtactctgtcatctgaattccaacctcctttgcctcctctaatttcagcatctgtattttaagtkaagggagaacttcctgctttacttgaatttctttccttgtcccatgatctggacatgcttctaggtagaaatccagaaccaatgcagggctcactgcatttaccttttctcatggatcacagtc

SEQ ID NO: 1283 - DNA, 401 bp, Homo sapiens
aaaactcaccagtagttttggcatactatgtatgacagtttcacccacacatgtccagtgtactacgggcatcaggtcaagtggacttagatgcagagttctgaagttctacttctgtatacgtktctctcctcaggtactctgtcatctgaattccaacctcctttgcctcctctaatttcagcatctgtattttaagtkaagggagaacttcctgctttacttgaatttctttccttgtcccatgatctggacatgcttctaggtagaaatccagaaccaatgcagggctcactgcatttaccttttctcatggatcacagtcctgaacttcattttatcaaagatctaaaaacagctatttcatattgttttttaatattttatttatgatgcaaagg

SEQ ID NO: 1284 - DNA, 61 bp, Homo sapiens
gctctgggtcccagttgttggtttcagggtrgtgggttctcagcgatcctcagagagggag

SEQ ID NO: 1285 - DNA, 61 bp, Homo sapiens
ggctttgccactggagaaagcccaagtttartcctgggttggggcctcctgaaacttttta

SEQ ID NO: 1286 - DNA, 61 bp, Homo sapiens
tttaatcctttggggtttggctcaccaagtrgatcggaaatgtgccggctgctttcttgtg

SEQ ID NO: 1287 - DNA, 61 bp, Homo sapiens
tgagaattataaagttgttattggtgggggkttttttttttggccaagtcatctcaagaaa

SEQ ID NO: 1288 - DNA, 59 bp, Homo sapiens
attttttttttcctgcagttactcaaccttkcagtgggacaagttgctcaatgacttac

SEQ ID NO: 1289 - DNA, 61 bp, Homo sapiens
ctttacctgtcttgatgcacggtggagaaakgagacccgcttcgttttccctctaatctag

SEQ ID NO: 1290 - DNA, 61 bp, Homo sapiens
actgtgttgcctctaaatgtgatttaactcrcatattcagaatcttagcaaaaataaataa

SEQ ID NO: 1291 - DNA, 61 bp, Homo sapiens
tagattattacagctttgttgtcatattatytctaggcagtaaatcatagtaaagtagtaa

SEQ ID NO: 1292 - DNA, 61 bp, Homo sapiens
ttgccatcaccctagttctggccatcctcaytgaccacctgactttctgcctaaatggtct

SEQ ID NO: 1293 - DNA, 61 bp, Homo sapiens
taatatcttttaaaaaattaactgggcatgkcggtgcgtgcctgtagtctcacctacttgg

SEQ ID NO: 1294 - DNA, 61 bp, Homo sapiens
taatatcttttaaaaaattaactgggcatgtyggtgcgtgcctgtagtctcacctacttgg

SEQ ID NO: 1295 - DNA, 61 bp, Homo sapiens
aaaataaaattagaaaggataggtgtgtktgggagggagactggttaatcagggtgcatgg

SEQ ID NO: 1296 - DNA, 61 bp, Homo sapiens
ataggtgtgtgtgggagggagactggttaaycagggtgcatgggattatgtagggcttgtc

SEQ ID NO: 1297 - DNA, 61 bp, Homo sapiens
ggggtgggggtgtggtggggaagagggagrgggcgaggccaggggagggtgcgaaggaggc

SEQ ID NO: 1298 - DNA, 61 bp, Homo sapiens
ggggtgggggtgtggtggggaagagggaggrggcgaggccaggggagggtgcgaaggaggc

SEQ ID NO: 1299 - DNA, 61 bp, Homo sapiens
ggggtgggggtgtggtggggaagagggagggrgcgaggccaggggagggtgcgaaggaggc

SEQ ID NO: 1300 - DNA, 61 bp, Homo sapiens
cgcagcgcggcccgggccccacgatcctccycctgctcctcctactcctcctcctcctcgg

SEQ ID NO: 1301 - DNA, 61 bp, Homo sapiens
cgtggcctctccctccccctctccctcgccsgtcctcttcgccctgcgctctgagcgcccg

SEQ ID NO: 1302 - DNA, 61 bp, Homo sapiens
cgttgagtcgcgcggtgcttcccctcctggsggccgccgctcacctgggcgccgagtccta

SEQ ID NO: 1303 - DNA, 62 bp, Homo sapiens
cctgggcgccgagtcctaccgggcgcctacrcccagagctcagggcaagggacagcagtccc

SEQ ID NO: 1304 - DNA, 60 bp, Homo sapiens
gcagtcccggccgcaccctcccagagtccygggagcgcttcgctccctggcacggcccct

SEQ ID NO: 1305 - DNA, 64 bp, Homo sapiens
tgacttataaatgcttcagcttctctgttgcayggtgttctactactcttttactaggcgatac

SEQ ID NO: 1306 - DNA, 61 bp, Homo sapiens
ttctttctttttcaagtacatatttgctatkcagcaaaggattgaatgacttctcaggaaa

SEQ ID NO: 1307 - DNA, 61 bp, Homo sapiens
atttaaaatgtgcatattttattaagcaaayggcgtagagttatttggtttaattttctgt

SEQ ID NO: 1308 - DNA, 61 bp, Homo sapiens
ttatttggtttaattttctgtaagtaactcstaaagaattgtcctaaaagctgtgggtgag

SEQ ID NO: 1309 - DNA, 61 bp, Homo sapiens
ttccacctggccattggggaaatggaatttrttacaaatcagctgtacaaaaatagatttg

SEQ ID NO: 1310 - DNA, 61 bp, Homo sapiens
cagttcttttaaatttgtgtctggtgggggycaattatttaaatttctggttggcatttgt

SEQ ID NO: 1311 - DNA, 64 bp, Homo sapiens
gaaatatctgattgtctctcccatttcctcygcagctggagcaacggacacactgaaagcatcc

SEQ ID NO: 1312 - DNA, 61 bp, Homo sapiens
ttgactactaccggtaataaaatcaaatggrttcagtgctcacaactcttcagtctttggg

SEQ ID NO: 1313 - DNA, 61 bp, Homo sapiens
actactaccggtaataaaatcaaatggattsagtgctcacaactcttcagtctttgggcta

SEQ ID NO: 1314 - DNA, 61 bp, Homo sapiens
tattaacatgtgcatttgctttttaagaagwatacacacgtgtacctttagctttgaaagg

SEQ ID NO: 1315 - DNA, 61 bp, Homo sapiens
tgcctctggcatttaagtgccccatgtggcmtctgtcaccctcagatcttcccattttctt

SEQ ID NO: 1316 - DNA, 61 bp, Homo sapiens
cacattttctttatccatttatctgttgatrggcacttagattgcttccaaattttagcta

SEQ ID NO: 1317 - DNA, 61 bp, Homo sapiens
ctgtgtttttctaggtacttactatttctartgagttttgtacttttagataatttctgat

SEQ ID NO: 1318 - DNA, 61 bp, Homo sapiens
acttggtagtcccaagtgtctatttttgccktctttgtgtcattgagtacccattgtttaa

SEQ ID NO: 1319 - DNA, 61 bp, Homo sapiens
ttggaaacctggctacacagcaatgcctccrttgactagagtcagtcagttgcatgtttct

SEQ ID NO: 1320 - DNA, 61 bp, Homo sapiens
ctctgaactcatgtcttttgttttcctgggyttataccaatttcctttgcttttattttag

SEQ ID NO: 1321 - DNA, 61 bp, Homo sapiens
gttgaaatcatggttttaagaatccttattrtaactatgacaataaaagactgcatcatct

SEQ ID NO: 1322 - DNA, 61 bp, Homo sapiens
atagtaatatattttcaaaacattgtatttytgtatgttttgtctactaatgaaggtgttg

SEQ ID NO: 1323 - DNA, 61 bp, Homo sapiens
ggtctattctccctctactttgtatttctaractaatctagggtttttatattttgttaca

SEQ ID NO: 1324 - DNA, 65 bp, Homo sapiens
cttatcatatttgttagaatgcaatctagaraagcaaatattgactctttgaggatcaattccag

SEQ ID NO: 1325 - DNA, 65 bp, Homo sapiens
cttatcatatttgttagaatgcaatctagagaagyaaatattgactctttgaggatcaattccag

SEQ ID NO: 1326 - DNA, 61 bp, Homo sapiens
tacattcagtaagggcacaggaaacagagtyaatataaaagaatcaactggttccttgtgt

SEQ ID NO: 1327 - DNA, 61 bp, Homo sapiens
cccccagttggtcatagagtcagtatgatcygaataaaaatttcagcactcagttttgtag

SEQ ID NO: 1328 - DNA, 61 bp, Homo sapiens
accaagaattgctagatagctgatgaaattyctaaatgagatataacaactaaaaaagaaa

SEQ ID NO: 1329 - DNA, 61 bp, Homo sapiens
aaagaaatgtattgagaaggtatttagcgayatagggaagaacttgaagctgacttaggga

SEQ ID NO: 1330 - DNA, 61 bp, Homo sapiens
tagggataagtacataaaaagttaagcaaayaggggaaaaccagaaacaattgttagctcc

SEQ ID NO: 1331 - DNA, 61 bp, Homo sapiens
gtagtaaaaggtggggcctttggaagatgaktaggtcatgatgctaaagctctcatgaatg

SEQ ID NO: 1332 - DNA, 61 bp, Homo sapiens
acatttctttttctttcttctctttttcttyttctcctttttctccttctcccctccccct

SEQ ID NO: 1333 - DNA, 61 bp, Homo sapiens
agtttgcaaataactctcccttctccatgarggtaacttggaattcgatgtgtgtgtatgt

SEQ ID NO: 1334 - DNA, 61 bp, Homo sapiens
aaaaaaaaaattcatactttactagtgggckattattggaatatgaagcatttcagtttaa

SEQ ID NO: 1335 - DNA, 61 bp, Homo sapiens
tgtgaatgttgtcaagggcgccaaggatgckggacttgcatttagatgcccaagcctctgt

SEQ ID NO: 1336 - DNA, 61 bp, Homo sapiens
ggtaatggagaagcctcctccctcatgcccrtgctcttgtcaggcctgtttgttaaggtcc

SEQ ID NO: 1337 - DNA, 61 bp, Homo sapiens
gtaattttatggtttacaaagcatattgacwtccttgatttattcatgttgccagctgccc

SEQ ID NO: 1338 - DNA, 61 bp, Homo sapiens
gaaactctgtatattctgttacccagaagcyctctgaacccaatccttttgggtttttaca

SEQ ID NO: 1339 - DNA, 61 bp, Homo sapiens
gttaagtgtccttagagcatatttttatagyataaaaattgggaaaaaattaagataaaga

SEQ ID NO: 1340 - DNA, 61 bp, Homo sapiens
ctccctcactgagaagtctggaacatgccamatgttcacagtgaggctgttaaaacttcca

SEQ ID NO: 1341 - DNA, 61 bp, Homo sapiens
cccaggaggctctttgattcttcatatcacrttatttttacctgaggattgtagataccct

SEQ ID NO: 1342 - DNA, 61 bp, Homo sapiens
gggattagaagtccaggccagaagtctgaartcatcagcttgggttctgttgatgtgaagt

SEQ ID NO: 1343 - DNA, 61 bp, Homo sapiens
cagtaaaggagctgaaataagattttagttmattggtagccacacatgcccacaggctggt

SEQ ID NO: 1344 - DNA, 61 bp, Homo sapiens
agcaaggagaccagatgtggctattttaaamatttttcgttgatacataataactatacat

SEQ ID NO: 1345 - DNA, 61 bp, Homo sapiens
atttatttggttcacgtttgtgatgtctggmaaaattcaaaattgggcatctgtatttggt

SEQ ID NO: 1346 - DNA, 61 bp, Homo sapiens
aactgtatgtttttgcacattaaccaaactstcttcattcctcactccctcatccttccct

SEQ ID NO: 1347 - DNA, 61 bp, Homo sapiens
atactactgagttttatttgtgttcacattyagtgctatgttaaaaaattcacaaagtaac

SEQ ID NO: 1348 - DNA, 61 bp, Homo sapiens
aatgttaagaggtactataatagctatttasatggcagagttaggatttcctgtttctttt

SEQ ID NO: 1349 - DNA, 61 bp, Homo sapiens
ttacaatgctcttttagccctgccatctggrgatggcttaagtgttaaacagctcagtgaa

SEQ ID NO: 1350 - DNA, 61 bp, Homo sapiens
gctacagctgactcagtgagatgggaatgakgtcagaaagatgaggaaagggcagtccaga

SEQ ID NO: 1351 - DNA, 61 bp, Homo sapiens
tgacatgatctgacttcttttttaacaagayggctcttattgtatcattaacagcatggtt

SEQ ID NO: 1352 - DNA, 61 bp, Homo sapiens
cccttggccaaaagtaagcacgacctctctkgcattgtgaacaaaaagaggaattaactca

SEQ ID NO: 1353 - DNA, 61 bp, Homo sapiens
atgggatggctgcacagaggcacatggagawgaagcaaggaagccaccttcagcttctggg

SEQ ID NO: 1354 - DNA, 60 bp, Homo sapiens
tggggctttgtaaattggactgacaaagacrgcttaacaagagagaagcaggagtttatt

SEQ ID NO: 1355 - DNA, 61 bp, Homo sapiens
tgaataatcccttaggacagggttgcctgakgaaatgggggacacccagtcaaattggaat

SEQ ID NO: 1356 - DNA, 61 bp, Homo sapiens
aaagagaaaaaacagagtcaatgcggaaaaygctgccaagacaacattttcttcttaagat

SEQ ID NO: 1357 - DNA, 61 bp, Homo sapiens
ctaggatgagaccagaaggggtcattttaaygagattttcagatgactttgaatttatatt

SEQ ID NO: 1358 - DNA, 61 bp, Homo sapiens
caaaatagagataaaaaagactttatctcastaatgtgtcatgcaaataaggattaatcct

SEQ ID NO: 1359 - DNA, 61 bp, Homo sapiens
cgtgcttagaaactacccctgttaaatactkaatatataacatttgtaatgttcaaatacc

SEQ ID NO: 1360 - DNA, 53 bp, Homo sapiens
gccaaagacttttgcaatgagctaactrtgttcaattattgctttcagatcca

SEQ ID NO: 1361 - DNA, 60 bp, Homo sapiens
gttttatgttttaatggaaacatttcatgtytagagaataatgatgcttaaaatttatat

SEQ ID NO: 1362 - DNA, 59 bp, Homo sapiens
agacagagcttaaaggcctctgtttgttgsgtcactttaaaaacaaaccctactgccag

SEQ ID NO: 1363 - DNA, 64 bp, Homo sapiens
catgagggtaacagcccccatcgttcrttcaattacctccgaccaggtcccttccatgacacat

SEQ ID NO: 1364 - DNA, 59 bp, Homo sapiens
gtacatctgtagtctcagctacatgaaggckgaggcaggatgattgtttgaccctggga

SEQ ID NO: 1365 - DNA, 58 bp, Homo sapiens
gctcaaaaaaagttttaatttattggtgactkagctgggtaaaggttggccattacat

SEQ ID NO: 1366 - DNA, 89 bp, Homo sapiens
gacttagagatatgtttatattacattgtcaagtgaaaagtgttgtataatayatgtgtgattgacttttctttctttgcttttccttt

SEQ ID NO: 1367 - DNA, 558 bp, Homo sapiens
gacaaataagtgtccatttgtaagacttaggcaaagatggattgattaggaaatttgtgattttagtcaattatcaagttatttgtgttatcctatttttttcttgtctctcagtaaaacagctaaatttccataagaatcccaggtggcttttaaaatctgtttggtaaggatgtgtggtttcacttattctgggatacagtggacatactcccttccctcttcctcatcaccagtctactgccttgaactactcataggtgttggtagaataaagacttggctctactatgaaatgaarataatcaaaaaaaaataaatgctccctttcttatgtccaggaaacagcggaaaaagctgcatgaccgtcttcggcagagccttcggtctgaacgaaacaatacgatgaacattgccaatgggcctcaccatcctaacccaccccccgagaatgtccagctggtgaatgtacgttgactctggccagtggaaaaaactgagcctctctcctttgttcagacgccttgaagtttattttcgaaagctcttaagctttta

SEQ ID NO: 1368 - DNA, 558 bp, Homo sapiens; identical to SEQ ID NO: 1367

SEQ ID NO: 1369 - DNA, 554 bp, Homo sapiens
ggtgtcctttgctatgaatgttcaatgaggcgttctgagatcaccaagaatagaagagacacacccccggctgtcagaagtttaaccttggagaatgccatgaagggcaattctggaagaaaaaagagaagggaattcctcgtaggtttaagatcagaaagtggggaaggcgggggtgctcttaaatgcatcagccctactgccagcacagtggggactattaacacatcatattttttttttcctgcagttactcaaccttkcagtgggacaagttgctcaatgacttaccaggagacaattgttatttttaaaaatgtctttcttattttaactacaaggacttggcttgcttagaggctcttgctcaggagtctttaaatgcaaatgagggaaaccccaggttataaagcatctgcttctgcaggttttcaatcctgttaccttagcaacatttgcccttgtattccacgcatcaccttgacagcctgcataatataagggacggagcggagcaggggctcggggtgggagcctggaaagaaaactggggc

SEQ ID NO: 1370 - DNA, 401 bp, Homo sapiens
tgaatgcaaaaatatgtctccacagaagcattagcataatttactgtacattcaatgaaattaagacagccaataaggaatataattcttatttattttgaaatgatggtaacaaatggctttgttaccttcaagcttcttactggcttaagctcttttaaaattctatggactatataagctactcaattttaagttttyatttttgaattcaagcttttttggttaggtaaagaatagaagtaactaccataaagaagaaaatataatcatctaatttctcctgaactctgtataacattggccattaatctacatcaatatatggtgaagatatgtaagcagaatgtacaatgtataagacatgcatatatcaatataaggtagtaatgtttatttta

SEQ ID NO: 1371 - DNA, 401 bp, Homo sapiens
aaatggctttgttaccttcaagcttcttactggcttaagctcttttaaaattctatggactatataagctactcaattttaagttttcatttttgaattcaagcttttttggttaggtaaagaatagaagtaactaccataaagaagaaaatataatcatctaatttctcctgaactctgtataacattggccattaatcyacatcaatatatggtgaagatatgtaagcagaatgtacaatgtataagacatgcatatatcaatataaggtagtaatgtttattttaaattccgcagatccatttagattcctttggttttatatttggtctattttgttactgcctctataattctgcttatttatttcaaattttacaacatctatttctcctttgag

SEQ ID NO: 1372 - DNA, 401 bp, Homo sapiens
aagctactcaattttaagttttcatttttgaattcaagcttttttggttaggtaaagaatagaagtaactaccataaagaagaaaatataatcatctaatttctcctgaactctgtataacattggccattaatctacatcaatatatggtgaagatatgtaagcagaatgtacaatgtataagacatgcatatatcaatrtaaggtagtaatgtttattttaaattccgcagatccatttagattcctttggttttatatttggtctattttgttactgcctctataattctgcttatttatttcaaattttacaacatctatttctcctttgagaaaacgtagacaactgatattgggatagagtttaaattgtgagaaatattcagttacagtaaaag

SEQ ID NO: 1373 - DNA, 401 bp, Homo sapiens
aaatgcattagaactagaacttgcgtgattttaaattttattagaagtaggtgtcaagttacctaagatgtccaagagacagctgatgggttatgagttaaattttgggttctgcttatcatttcttagaaatcaatttaaggcatcagttttcaatagcttttttatgtataactaaaaaagagatatatgatatttggyaaaataaagatacatggcttccagtctcttgagacatctgtcttcatgaaagagatggagagttcccatttctacttacaagaatgaatgtatgtcataataaagaccagctatcatttgttatatacaaaatatgtggttctttctttgactttttttctggatttagacaaccacagatgacatttatgagaaatgaa

SEQ ID NO: 1374 - DNA, 401 bp, Homo sapiens
agttacctaagatgtccaagagacagctgatgggttatgagttaaattttgggttctgcttatcatttcttagaaatcaatttaaggcatcagttttcaatagcttttttatgtataactaaaaaagagatatatgatatttggtaaaataaagatacatggcttccagtctcttgagacatctgtcttcatgaaagagayggagagttcccatttctacttacaagaatgaatgtatgtcataataaagaccagctatcatttgttatatacaaaatatgtggttctttctttgactttttttctggatttagacaaccacagatgacatttatgagaaatgaactacactgaattcaactgagaaagtagaagattctgtatctccattaacttgtgag

SEQ ID NO: 1375 - DNA, 425 bp, Homo sapiens
tcttcattgcaatgctgtggtctcctgagttggttttgtctatgcagtgcaggaagaatctgttggctggttacaattttatattaagggagggtacccaagagaaaattctagcccatttctattgcttcatttttcacattgcatgcagtcagtggtgatgtactttctctctctctttttttagagagagagttcctttttttttttttttagagagttcctcattacttgttttgaacctaaasttataatttagtgtctgtgacagcacatttgattgtttttaaatgaaggtgataggaaaggcagaagaatgactagggaagaaaatctggagaacagatgacaagataacattgcttttgattctctgcaaacaagcatggtattgaaaaatgatccaaaatcgtttgcttgagcac

SEQ ID NO: 1376 - DNA, 401 bp, Homo sapiens
tatccagcaatacgtatctaaaaacgtcatctccagtgagcatattgttgagagagaagcagagacatccttttccaccagtcactatacttccacagcccatcactccactactgtcacccagactcctagccacaggtatgagaatttaaaaattccacggcttttctctcagaatgaattgttgcacattgcctttttgatatccctgcctaagaaaggaggcagtgaaatggatggtctttgggcagcaacagattttgaaaatcaactggctttgcccttaattcctgcataaatttgaacctcaattaggtaactccacagggccgttgtttcccattcctgagattgtctttactcatgccctgctactcaccgaattgctacactgggacaag

SEQ ID NO: 1377 - DNA, 714 bp, Homo sapiens
gaccagatcttacgagaactcggtcactatcatgagtacagtaccaagagggatggtgctaaaacgttcttgagaaatctgcccccatgattacaatcacctcccaccagagcccacctccaacactggggattacatttcaacatgtgatttggtggggacacacatttaacccatatcaactactaagctcattcttttttttttttttttttttttgagacggagtctcgctctgtcgcccaggctggagtgcagtggcgcagtctcggctcactgcaagctccgcctcccgggttcacgccactctcctgcctcagcctcccaagtagctgggaccacaggtgcccgccaccacgcccggccaattttttgtatttttagtagagacagggtttcaccgtgttagccaggatggtctcgatctcctgacctcgtgatccgcccgcctcggcctcccaaagtgctgggattacaggcgtgagccaccgcacccggcctaagctcattctttaaaaccttataaatacacccattcagtcctagccagcgtggccacacaatgtaagattctctctctcttctgttctctctctctctctttcactgacctttacaactttctatatcaactcacatttttgtcctttattttcgtctttcttatttaaatgacctctaaactactctaggataaaagtcactgtcattttt

SEQ ID NO: 1378 - DNA, 401 bp, Homo sapiens
ctctccctgtggcacaccctgtgaggggsacaagggaacttttcccattttactaccaaggccagtgacatgaatgatcaaatacyaaccagctacattttatttaatttttaatttttttagttgtcagaagattttattaactgtaagccagggaatggactgatcgattttattatgcaaatcaatgaaaaaaaaaaactcttttagaaggacacaaacacacacacgtgctcacagggaagctggttgttggttgagagtcaggtcagaaccttggagagctcaagataaagcgggggcagaaccacaatcagaagcttccatggctgccccccacatggatgagttttatttaattatttttttccttcaacttttattataagctcaggggtaca

SEQ ID NO: 1379 - DNA, 404 bp, Homo sapiens
ccctgtgaggggsacaagggaacttttcccattttactaccaaggccagtgacatgaatgatcaaatacyaaccagctacattttatttaatttttaatttttttagttgtcagaagattttattaactgtaagccagggaatggactgatcgattttattatgcaaatcaatgaaaaaaaaaaactcttttagaaggacacaaacacacacacgtgctcacagggaagctggttgttggttgagagtcaggtcagaaccttggagagctcaagataaagcgggggcagaaccacaatcagaagcttccatggctgccccccacatggatgagttttatttaattatttttttccttcaacttttattataagctcaggggtacatatgcaggatgtgcaggtt

SEQ ID NO: 1380 - DNA, 401 bp, Homo sapiens
attttatttaatttttaatttttttagttgtcagaagattttattaactgtaagccagggaatggactgatcgattttattatgcaaatcaatgaaaaaaaaaaactcttttagaaggacacaaacacacacacgtgctcacagggaagctggttgttggttgagagtcaggtcagaaccttggagagctcaagataaagcgggggcagaaccacaatcagaagcttccatggctgccccccacatggatgagttttatttaattatttttttccttcaacttttattataagctcaggggtacatatgcaggatgtgcaggtttgtgacataggtaaacctgtgccatggcggtttgctgtacagatcttcctgtcacctaggtattaaacccagcaccc

SEQ ID NO: 1381 - DNA, 405 bp, Homo sapiens
attaaaagatgttcttcaggcagaaaaaaataatatatcagactgcaatgtagacctatacgaggaaataaatttcattctttctttaagatactgactaccctaaagctgtctcacctagagccctttccctcaacttttcttttcttttctctctctctctctcccttcctttctgtcttctcttctcttctcttttcttttcatttcttttctttctttttgacagagtttcactctgtctcccaggctggagtgtgatatcggctaactgcaacctctgcctcctggcttcaagagatccttgtgcctcagcatcctgagtagctggaattacaggtgtgtgccaccatgcctggctaatttttgtattttcagtagagtcggggggtttcaccatgttgg

SEQ ID NO: 1382 - DNA, 401 bp, Homo sapiens
caaggcagtggcaagaatggctatcccagttttgggtcaaaacaagtgacaactaacaagacagagaacatatttatgcttgctactttaatgtttggtctcattatcttattagatatattgaacgatatttgtaaataggcagggaaaattgaagctttgtgtgtgtgcgtgtgcgtgtgtgtgtgtgttttattataaggtagcttttawagcaatgggatttcttctcataacagggtagaaggggcatggttccttccccattctgaagctttgtgttgtttttttgcttttttttctagtataaagagttcaattagggtaactctgccccttacctcatttgtcctggtgatacgtatgaaataacaccaatttgctagttagattaattgtga

SEQ ID NO: 1383 - DNA, 401 bp, Homo sapiens
tggctatcccagttttgggtcaaaacaagtgacaactaacaagacagagaacatatttatgcttgctactttaatgtttggtctcattatcttattagatatattgaacgatatttgtaaataggcagggaaaattgaagctttgtgtgtgtgcgtgtgcgtgtgtgtgtgtgttttattataaggtagcttttawagcaatgggatttcttctcataacagggtagaaggggcatggttccttccccattctgaagctttgtgttgtttttttgcttttttttctagtataaagagttcaattagggtaactctgccccttacctcatttgtcctggtgatacgtatgaaataacaccaatttgctagttagattaattgtgattagtgattagattaat

SEQ ID NO: 1384 - DNA, 401 bp, Homo sapiens
gttttgggtcaaaacaagtgacaactaacaagacagagaacatatttatgcttgctactttaatgtttggtctcattatcttattagatatattgaacgatatttgtaaataggcagggaaaattgaagctttgtgtgtgtgcgtgtgcgtgtgtgtgtgtgttttattataaggtagcttttawagcaatgggatttcttctcataacagggtagaaggggcatggttccttccccattctgaagctttgtgttgtttttttgcttttttttctagtataaagagttcaattagggtaactctgccccttacctcatttgtcctggtgatacgtatgaaataacaccaatttgctagttagattaattgtgattagtgattagattaattgtgtgcactc

SEQ ID NO: 1385 - DNA, 401 bp, Homo sapiens
aacaagtgacaactaacaagacagagaacatatttatgcttgctactttaatgtttggtctcattatcttattagatatattgaacgatatttgtaaataggcagggaaaattgaagctttgtgtgtgtgcgtgtgcgtgtgtgtgtgtgttttattataaggtagcttttawagcaatgggatttcttctcataacagggtagaaggggcatggttccttccccattctgaagctttgtgttgtttttttgcttttttttctagtataaagagttcaattagggtaactctgccccttacctcatttgtcctggtgatacgtatgaaataacaccaatttgctagttagattaattgtgattagtgattagattaattgtgtgcactccacttcttcttg

SEQ ID NO: 1386 - DNA, 398 bp, Homo sapiens
agtgacaactaacaagacagagaacatatttatgcttgctactttaatgtttggtctcattatcttattagatatattgaacgatatttgtaaataggcagggaaaattgaagctttgtgtgtgtgcgtgtgcgtgtgtgtgtgtgttttattataaggtagcttttawagcaatgggatttcttctcataacagggtagaaggggcatggttccttccccattctgaagctttgtgttgtttttttgcttttttttctagtataaagagttcaattagggtaactctgccccttacctcatttgtcctggtgatacgtatgaaataacaccaatttgctagttagattaattgtgattagtgattagattaattgtgtgcactccacttcttcttgc

SEQ ID NO: 1387 - DNA, 410 bp, Homo sapiens
aatatattagtagggcatggtggcatgcgcctgtcatctcagttagtcaggaggttaagttgagaggatcacttgatcccaggagggtgaggcttctgtgggctgtgattatgccactgcactctagcttgagtaacagagcaagaccctatctctaaaacaaaacaaaacaaaacaaaacaaaacaaaacaaaacaaaacaaaacaaaaggctaatgagcattaaacctacagaaaggaatctgagcagaaaaagccaatggtcaatgatagggaatcctgatttcttactgacacccaaaacactaataaatctcttgatgatgtatgagttgctgttaccttgcacagcagtgagcagttctatatggcaattgctcagttagctctcaacttcctgaacagcagtt

SEQ ID NO: 1388 - DNA, 402 bp, Homo sapiens
kacaagcagccaracccttttgccaakyacatgcccattatgaggcytatggaaaatgttgtgattaaagkagttcsttttccatgggcaccccatgtgtacttstgcwaaatggamcartagcttgmaaagccktaccagatkwgctgtstcagcttmcccwgtgggtcttactgatcaaggacattatagtaaataaaaaawaaaaatgagagagmcaaagaagagagtcatggacttgtcccagcagggtaggagtctttagatggttattgagaaactggatgaatgttgtggatattgatggtgttgaaacaaaagtattaatgcagcactattgaaggttagatgaaccaatgggactttctgtttgtctcccaacattgaaaggctccaacaagt

SEQ ID NO: 1389 - DNA, 450 bp, Homo sapiens
tcaacaaacaatgctgggcactgctaacacccagcccaggggaaagggcttgtaccctgacccaataggacctcttgactattttaatacagatggaagctgaagtggccatggggcagtgacctgctattctggctgctgaggtccaagagacccacccatgggagtctgatggccttccaaacttatggaagttctctgagggcacttgtagttttacactgatagactatgaatgctctcacccacagcatagatcaaaatgaaatacatcctgcagtacagttggtagaaatgggaaccactctgaataccacctgtgtcctccctgcaagaaggaggtgggccttgctatctaataatacacaatggaaaccagcctcagtacaagcctgtgagatgaggtggggtggttctttttgtcctcaattaactagaaacccagatata

SEQ ID NO: 1390 - DNA, 412 bp, Homo sapiens
cattgcacagtgataagtcactgcatgtgcgacagcagagaatgagccccgcctgggaaatagcctgtatctttccacttgtcctgactgattaacaatttatgctgcatgagtagaaaataattttgacctcattcactttattgcttgtgaaatcatggcagtatccatagactttttgcttaaacatttatattagtaggcatttttgtgttttcacatggctgcatgaaatgaacaggcacttttctaatatgaacatacagtgaatgaattaataactgtatgtttctaagagccacatttctgttagaactagccatataaggcatatgactaatgaattcagatatttaatattgaagtttaggaaaatgtcatttccactgggctgagaattagagtcaggagc

SEQ ID NO: 1391 - DNA, 404 bp, Homo sapiens
tggaggtgagggagggtgaaaatgtgcaatagatgatgacagtgttggagaaggcagaggtttttgccataaagaatctctagctgggatcacttgaggccaggagtttgagaccagcttgggcaacaaagtaagaccccagctctataaataaataaataagtaaataaataartaaataaataaataaataaataaataaatcagctgggcatggtggtgtgcatctgtagtcccaactactcaggaggctgaggcagaaggatcccttgagcctaggagttcaaggctgcagtgagctatgatgtgccactgcactccagcctggggaacagagcaagatcctgtcttttaaagaggaagagagagagactgactccattgggctttttctttttcacgtt

SEQ ID NO: 1392 - DNA, 404 bp, Homo sapiens
tctggcagaaaatgcatacagagagagaactcagcatgggagtttcttgtattttcaaatgacttctaattcctggttactccatgcacagaggttgtactcctggagagcttaaaggtaacaaatagctttgatggaatgtggctgcaaagatattaaccttcctacagaagagagattagcagcagacatgtgcctattgtgtgtgtgtgtgtgtgtgtgtgtgtataaaatcagtatgttcaaataaactgtctgggttgctgctttggtttgtgctaattattttgttttcaaagttttaggaaagaactccatttatattgttttaaagaaaaaacaaagattgactgaggtaaacttggagtaagtataggcataatcaaatagggtcccctagatca

SEQ ID NO: 1393 - DNA, 401 bp, Homo sapiens
accatcctggctaacacggtgaaaccccgtctctactaaaaatacaaaaattagccgggcatggtggtgggcgcctgtagtcccagctactctggaggctgagacaggagaatggtgcgaacccgggaggtggagcttgcagtgagccgagatcgcgccactgcactccagcctgggcgacagagcgagactcactctcmaaaaaaaaaaaaaaaaaaaaaaaaaaaggaaccaagttgtgagtgagaaggacctggaaaggcactgttagtggcagtggatccgtaggggtctgcaggaacctcaactcttgcgtcctcagaagaattcgacggaggaggcatgaggcagaaggagagacagaggcaagttttatagcagaagtgaaagtttatttaaaa

SEQ ID NO: 1394 - DNA, 401 bp, Homo sapiens
tataaggaagggatccagtttcagctttctacatatggctagccagttttcccagcaccatttgttaaatagggaattgtttccccatttcttgtttttgtcaggattgtcaaagatcagatggttgtagatgtgtggtattatttctgagggctctgttctgttccattggtgtatatctctgttttgktaccastacyatgctgttttggttactgtagccttgtagtatagtttgaagtcaggtagtgtgatgcctccagctttgttcttttggcttaggattgtcttggcaatgtgagctcttttcagattccatatgaactttaaagtagttttttccaattctgtgaagcaagtcattggtagyttgatggggatgtcattgaatctataaatta

SEQ ID NO: 1395 - DNA, 404 bp, Homo sapiens
tcttctcaaggagtatctttgtggcgttctctgtatttcctgaatttgaatgttggcctgccttgctagkttggggaagttctcctggataataccctgcagagtgttttccaacttggttccattctccccatcactttcaggtacaccaatcagatgtagatttggtcttttcacatagtcccatatttcttgaaggctttgtttgtttctttttactcttttttctctagacttctcttctcacttcatttcattcatttgatcctcagtcactgatatcctttgttccagttgatcgaatcagctactgaagcttgtgcattcattacatagttctcatgccatgtttttcagctccatcacgtcatttaaggactcctctacattggttattctagtta

SEQ ID NO: 1396 - DNA, 426 bp, Homo sapiens
actttaaaatatttagagaataaatgtttaagaatattttacagggtaggggaaaatttcttaagcaatcacatgtagcataatgtcaaaatggaaaggctgataaattagatttaaacaatctaattttaaattagatttaaacagtctaattttaaattagatttaaacagtctaattttaaattagatttaaacagtctaattttaaattagatttaaacagactaattttaaattagatttaaacagtctaattttaaattagatttaaacagtctaattttaaattagatttaaacagtctaattttaaattagatttaaacagtctaattttaaattagatttaaaaaattaaggccttttcttcgttcaaagatactttaaattttgtaaaaaataagcatcaaattgaaagaaatttg

SEQ ID NO: 1397 - DNA, 404 bp, Homo sapiens
tgcttataccatgatattttagtattccctcttgccttctccatttttcaatatctggtcggatagcaattctttatattgaattatttctgtaaaaataactgttggggtttctattctatatcttagatggactctaactgaattaatacatatgtaaatatatggtgaatatatataaattataaacatatgtctctatatgtatatatagatatgtgtctctatatcaatgtatgtattatagatatatacatatatgtatatatagaaccatagataattctccttaatatgcatgtacatagatatgtacatccatattatatgatatagaatatataaatataatatctaatatatgcatattaaggagaattatctatggttctaaatatgcrtta

SEQ ID NO: 1398 - DNA, 401 bp, Homo sapiens
aaggtttccactgaaaagtctgctgctaggcatattggctctccattgtatgttatttgtttcatttttcttgctgcttttaggatccctgctttatccttgatctctggcagattgattattaaatacttgccattttgagtctattttctagatcctgtaggtgtgcttcattgttttttattatttttatttttttttctcttgyctcctctgtgtatcaaatagcttgtcttcaggctcacacgttctttcttttggttgattaattttgctattaaagkactctgctgtatttttcattatgccaattgcatttttcagcttcagaatttctgcttgattctttttaattatttcaatctctgttaaatttatctgataagattctgaattccttc

SEQ ID NO: 1399 - DNA, 405 bp, Homo sapiens
tctgaccactgccctatcctgctatggctgagctggtatccaagatccaakacaaagtcctcccaacttttccctctcctcttctgaagtggaagaaagggatttcttttcgagctgtgagctgtgaagcctgggggtaggggaggggtgatgccggcactcctttatccacctcagctggtgtctcagtatgtcatgtgccccccccccccccccccagtccactgtttcaggacctggttcagcactgggactcacctaattgttgcagaccttatggactacattggctttcaagtttgtttggagacacagagcactttggtcactggtagtgaggtttgcaggaactcaagttctgacctctgggatccatgatccctctctgagtagtgccggtttaaa

SEQ ID NO: 1400 - DNA, 405 bp, Homo sapiens
tgttctctctcctctagcacccagagatgctctctgcaccatgccatgacttccagggggtggagaacaggtaatgtcaggggttcagggctcttttttctatctcttcagttgcctctttcagtgatatgaagttaaaaccaggtactatgagtgctcatctgatttttggttcttatgaagctgtttttttttttttttttttctgtgtagatagttgttaaattggtatctttgtggagaaggcaatcagtggagccttctgtkcggccatcttgctccttatacctgctactttgtattctctgatctatgtctcttcatttctccactcctctgttccaaccacccctggtaaccatgtttgtcttctctatttctgtatatttatttacttattttaga

SEQ ID NO: 1401 - DNA, 415 bp, Homo sapiens
ttaaatctttaatttgtcttgagttaatttttgcaaatggtgaaagatgggggttcagttttattcttctgcatatggctagccagctgttctaacaccatttgttgaataaggagtcctttccccattgcttctttttgttgaccttgtcaaagatcagatagctgtatacatgtagctttatttccgggttctttatttccgggttctttattctgttccattggtctatgtgtctgtttttgtatcagtaccatactgtttgggttactgtagctgtatagtatagtttgaagtcaggtaatgtgatgcctccagctttgttctttctgcttaggattggtttggctattcaggctcttttttaagttctgtatgaattttagaatagttttttttctagttctgtgaaaaa

SEQ ID NO: 1402 - DNA, 414 bp, Homo sapiens
gataaatttattacttttgttctttccttagtggacgtaataataattactactactttttgggcattacttctctgcttgtgatacggctctggcgagtagaggaacactagggctcttgtctcatgttcaattagataaaacaacatggacacacttggagtggttttaaggagcagagggtttaataggcaagaaaaaaggaagaagaaagaaggaagaagctcccctatacagagacagaggaaggggggctccaaagccaagagagggaaccccaagtgaagcagaaaccagccatgtgtatacagaggctggaggaggtggtgtctgatttgcacagggctcgggggattggtttgaccaggcatgtgattcacatagcctgggaaaaagctggccttcccaccctag

SEQ ID NO: 1403 - DNA, 414 bp, Homo sapiens
accccgtctctactaaaaatacaaaaattatttgggcatggcggcacatacctgtaatcccatctacttgggaggctgaggcaggagaattgcttgaacctgggaggtggaggttgcagtgagccaagatggcgccactrtattccagcctgggtgaaagagtgagtgagactctgacacacacacacacacacacacatacacacacacacacacacacacacacacacacaaagtagtaagcactcaggagttcgataaccacctttatgttgatggcttctaaatctctgatatcagtccagatccttttcttgacctcaactacagggccaactaactactagatttctcaaacactattaagacagaactcttcacctctcccaggtctccaaatttattcttcctctc

SEQ ID NO: 1404 - DNA, 433 bp, Homo sapiens
cttagaaaatatacccccaaaaagcttcagtttcaattagctgggcgtgatagcacgygcctgtaatcccagctactcgggaggctgaggcatgagaattgcttaagcccagaggtggaggttgcagtgagccaagaatgggccactgcactctagcctgggcgacagagcgagactccgtctcaaaaaaaaaaaaaaaaaaaaaaaaaaaaaaaaaaaaaaaaaaaaaaaaagaaatgaatgygcatatgactaccatcctaatataaatggagcttatgccagtactatttgcagtagtactacttgaaataatgctcacaataaattttatgcttattaaatagtaattatacataatatagaaagtcaaatagtgctacaaaacttacaataacaacactcattaacttgacccccttccaaatctgat

SEQ ID NO: 1405 - DNA, 412 bp, Homo sapiens
attcattcattcattcattcattcaacaatatttattgaataattatgatatgccagggactaagatagatgctggagatagacacaaacccctgcccttcagtatcttatcttctaatggttgaaggcaggtatgggattgcaagtaccaaaagatgggtgatatcaattttttgtttttttgtttttttttgagacagagagtgcctggtacatagtaagtgctcaaaagatggtgcctaaaaggatggaccaagtgttacacaagtcatattctatttggttaatacacttctccacttctgagaaacatattattgttaaagttaaggtagattaattatgttaagaataaatggtctgggcatggtggctcatgccctgtaatcccagcactttgggaggccgaggt

SEQ ID NO: 1406 - DNA, 404 bp, Homo sapiens
agtgagacctaattaaactaaagagcttctgcacagcaaaagaagctatcaatggaataaaaagataacctaaagaatgagagaaaatattcacaaactatgcatctgacaaagatctaatatccagaatttataaagaactaaaataattcaacaagtagaaacaaataatcccattttaaaaattgggcaaaagacataaagaaacacatctcagaagaagacatgcaaatatccaacagatatatcaaaaaatgctccacatcactaatcataagagaaatgaaatcaaaaccacagtgagataccgtattcatctgttctcatgttgctaataaagacataaccaagactgagtaatttataaaggaaaaaggtttagttgacccacagttcagcatggt

SEQ ID NO: 1407 - DNA, 404 bp, Homo sapiens
tcactcggttgcccaggctgcagtgccttagcacaatcatagctcactgcagcctcaagctcttaaggctcaagggatcctcccacctcagcctcctgagtagctgggaccacaggtgtgcaccactgtgtctggctcctattacacagaacattttacttggttttctcactgattttgtgatgttgtcctaattmcatagcgctggcacaaagattatataagcagtagggtactttgtggactcacgtgtggccaggtttgtcccaggatcttcaccctttcactcccttacttgtgactcaccccagcctatacagtgggaagaaattgaggtggagttgaagggattcatagaggtaatgaccccttggattgctggggagggctgtggcaacatcctc

SEQ ID NO: 1408 - DNA, 406 bp, Homo sapiens
ggaaggggaacatcacactctggggactgttgtggggtagggggaggggggagggatagcattaggagatatacgtaatgctaaatgatgagctaatgggtgcagcacaccagcatggcacatgtatacatatgaaactaacctgcacattgtgcacatgtaccctaaaacttaaagtataataataataataataataataataaatgtttagaaaaaaattctatcataaatatgaccatttaatttcctacaagtttttcaaaagtttcttcttgggtttattcatccctatggaaaattccttagagagatttargaatcttcagtgaatacttttagaacaaatggaaagaaagcaaaaatgctgtttcatcattgagaaaaataaaactcaaaacaagct

SEQ ID NO: 1409 - DNA, 401 bp, Homo sapiens
aaaacttgttttgtggctgcatagtattccatggtgtaggatgaagctggaaaccatcattctcagcaaactatcgcaaggacaaaaaaccaaacaccgcatgttctcactcataggtgggaattgaacaatgagaacacttggacacaggaaggggaacatcacacaccggggcctgttgtggggtgggggtagggggggagggatagcattaggagatatacctaatgtaaatgacgagttaatgggtgcagcacaccaacatggtgcatgtatacatatgtaacaaacctacacgttgtgcacatgtaccctagaacttaaagtataataaacatatatatatatatatatatatatatacatatataaacttgttttgtgaattttgaaatagtttt

SEQ ID NO: 1410 - DNA, 403 bp, Homo sapiens
catcacacaccggggcctgttgtggggtgggggtaggggggagggatagcattaggagatatacctaatgtaaatgacgagttaatgggtgcagcacaccaacatggtgcatgtatacatatgtaacaaacctacacgttgtgcacatgtaccctagaacttaaagtataataaacatatatatatatatatatatatatatacatatataaacttgttttgtgaattttgaaatagttttacacatacataggcattgcgataatgctacggacagttcccacagtccctgttacctagtgtccatcatggaaagcatataacgtaatcatagcacaattatcaaaaccaggaaatcaacattggtaaatgctattaactaaaccatagatcttttccagat

SEQ ID NO: 1411 - DNA, 403 bp, Homo sapiens
tatagaagctcagtgatctttttattctgttttactcaggctattctgtattcaggtaggatatctatcacccttactcttctctaaccccatcttaaaaaacaaagcggcggggagtttttcttttgatatcagcaacagataaccaaataagatggcgtataatcctttttttttttttttttttttttttttttttttttgagatggagtctcgctctgtcaccgaggctggagtgtggtggcactatctcagctcactgcaagctccgcctcctgggtccacaccattctcccgccttagcctcccaagtagctgggacgacaggctcccgccaccacaccaggctaattttgtttctgtatttttagtagagatgggggtttcaccgtgttagccagg

SEQ ID NO: 1412 - DNA, 407 bp, Homo sapiens
tgttttatgtctgtgattgtaagcttttagcagtttctcttcttctatttctttttttttatattttttattatactttaagttttagggtacatgtgcacaacgtgcaggtttgttacatatgtatacatgtgccatgttggtgtgctgcacccattaactcgtcatttacattaggtatatctcctaatgctatccttcccccctcccccctcccccctccccccaccccacaacaggccctggtgtgtgatgttccccttcctgtgtccaagtgttctcactgttcaattcccacctgtgagtgagaacatgcagtgtttggttttttgtccttgcgatagtttgctgagaatgatggtttccagcttcatccatgtccctacaaaggacatgaactcatcatt

SEQ ID NO: 1413 - DNA, 404 bp, Homo sapiens
tcctaaatcctaatttagctgtgggaagtttggatcaatggaaattaaactccatatatgccaacactatgggttgataacctcttccaagaatcattgcctgaccatcatgttccttctacctgaccactccttcctgcacttttatcacatattactctaagggatcatgtctaactttttgtcttcctcaattagactgagtatttcttgaggccaggaaatgcatcattttatccatagcatctaactcaatatctaatgtgtaataaactcttaatagaaatttacttaataactagatagatagtttaagatatgcccttgatgtagtcaagaagacaaaatgtatgggtacatttccttcttgtgtctggttcctctttctgcattgtcagggcaag

SEQ ID NO: 1414 - DNA, 404 bp, Homo sapiens
aaacattttcagaaaaaaagttgctgtgtttccgggagaagcagatggctgctattgagagacacctaggtttgtgttctgggaatctgtctcctactcatgatagcagggggcagattcagatctgcaggaggtagaaataggcatcagatcactctgtcctaaaaaacaaacaaacaaacaaacaaacaaacaaacaaacaattggaagaaatgaattgatcacagaagcatctagagctaggaccaattaaaagtcagttagtttatatgacctatttgaagatttctcaacaatcttgacctattgcttaagagcacaacatttgtagtaaaatgagcctaagttaggatatgacttaagatcactgaccagctgtctaagcttgttagggttacccaat

SEQ ID NO: 1415 - DNA, 527 bp, Homo sapiens
atgattttggtgctttaaaatgaacttgttttattgcttatcatatggtccaattttgttaaacattcaatttgccctgggaagtaacatgcattttgcttattttaaaagcagtgcattataaatgcaaattaaggcatttatatataatgacatatatatgtgtgtgtgtgtgtatacatatatatgtatacatatatacgtatatatacatatatatgtatatatacatatatacatatatacacatgtatacatatatatgtatatataaaatgacatatataatgacttacatatattgactggcaatatccctactggtatttgcttttgacttgtttcmtcagctactgggagaggtatgtcaaaatctcaaactttggttgtgaatgtactattctttataaaatttaaaactgtgttattaggtctataaacattaagaatgtttgtatatttttggtgtaatgacccttttatcagtatttttttcatatttatctctagaaatgctttgaagccta

SEQ ID NO: 1416 - DNA, 404 bp, Homo sapiens
atgaagatccaaaggcataagaatgatacattggacttcggggacttgcagggaaagtttggggactggcgaaggataagagaatattcactgggtacagtgtacactgctctggtgatggctgcaccaaaatttcagaaatcactactaaaaaacttactcatgtaaccaatcaccccctgttccccaaaaacctattgaaataaataaataaataaataaataaattgaatgaatgaaccaaaggtattgcacgaggaagcaacataaataaacttagtgagtgaaacagtgaagaaaggggcaatgtgatggtggtgataggtatacaggttaccttgttcacccttttaatactgtggataaacagaatcaagtaatttgttcagctaactagattccat

SEQ ID NO: 1417 - DNA, 404 bp, Homo sapiens
cctgcaaggcgctaacagtgaactttctatccaaaaagatagaaagaagttgtctctggttttgaacaatgaagatttatatctaacttatattgaaaaatcaaaggattagattttttaaactgaataagaaccatagctgtacttagagaatatctgtgatgcacttggcactgtgataagatgtgatgtatatcactctttatgattacaccaaccctgaatggcacttattttcaggtgtgacactagcctatggcggctgtcatgagrattagaaaatggtgtcccctccaggaggatactgcctgtgcctgagaatagagcacaggctgcatctaaggacccactgaccttctaggccagatatctttgtgtgtggcagagcctgcctaaatgtacat

SEQ ID NO: 1418 - DNA, 402 bp, Homo sapiens
gtctctagtaaaaatacaaaaaaattaactgggtgtggtggtgcattcctgtagtcccagctacttgggatgctgaggcaggagaatcacttgagcccaagaggcaaagttgcagtgagccaagatcatgccactgcgctccagcttgggctacagagtgagactccatctcaaaaaaaaaaaaaaaaaaaaaaaaaaaaaactactacttatcaaggaatgttttgaatgctttaattctttgacttaaattactatatwtatttataaaggtgtagaagatttracaactggaatgtgtgtgtgcgcatgcacatatacacacatatgcacatatgtatatatgtgtatgtataacatatatatctataaataaaagttatttaccaaagcatcatatat

SEQ ID NO: 1419 - DNA, 412 bp, Homo sapiens
agagagcgcactatttctaccccatcagagaacatgaagggatgcagagaagaatatgttgagttgactacctacctcacagaggacctctgcatgacatttagttgaagggaactgccttctctttttccaggaagattaaatctttatcctctctgccattcagtttaatacctatgtgcaaggcatcagtagagaccagatagatagatagatagatagatagatagatagatagatagatagatagacagacagatagataggcagagatgtttgtgtgtgtgtttgtgtgtgtgttgtgtgtttgtatctctaagtacatgaagaattggcatacatcccagaacacaacagactgaaactcctgattaaagataacaggtaaatggaatggacatccaataaaaac

SEQ ID NO: 1420 - DNA, 407 bp, Homo sapiens
ctgagttgaaataattctagctcatagttaatctataaagccttatccagagaaattggagattatctttaagcattttgaaatattaagcatagcctgctggccccaaatgacattttttttaatatttacaaattattaataaaactaaaaatttccatcccttccctggaaccccaagcaaccaccgattatttatttatttattatttatttatttatttatttatttatttatttatttatttattcattatagagatggagtctcactatgctgcccaggccggtcttgaagtcctggccccaagtgatccctccgcctcagcctcccaaaatgctgaggccacaggcacggatgcagagtttgcagatgggcagctaccattttcgagtatgcagtaact

SEQ ID NO: 1421 - DNA, 404 bp, Homo sapiens
ccttatccagagaaattggagattatctttaagcattttgaaatattaagcatagcctgctggccccaaatgacattttttttaatatttacaaattattaataaaactaaaaatttccatcccttccctggaaccccaagcaaccaccgattatttattatttatttatttatttatttatttatttatttatttatttattcattatagagatggagtctcactatgctgcccaggccggtcttgaagtcctggccccaagtgatccctccgcctcagcctcccaaaatgctgaggccacaggcacggatgcagagtttgcagatgggcagctaccattttcgagtatgcagtaactgagttttgtgagaagagcaaagtggaaagggagaatgacttaatt

SEQ ID NO: 1422 - DNA, 404 bp, Homo sapiens
gctgggcatggtggaggctgtgcttgtagtcccagctacttgggaggctgaggcagaagaattgcttgaatccaggaggcagaggttgtagtgaggtgagatcacgccactgcactccagtctggtgacagagtgagactgtctcaaaaaaaaaaaaaaaaacatatatgtgtgtgtgtgtgtgtgtgtgtgtgtgtgtgtgtgtgtgtgtgaaattatgacagaatttacctgtaaggtgttagtcatggaatactatgcagccataaaaaagaatgaaatcatgtcctttgtagcaacatggacgcagctggaggccattaccctcagtaaattgaggcagaaaaagaaaaccagataccacatgttctcacttacaagtgagagctgaactgagtatgcat

SEQ ID NO: 1423 - DNA, 409 bp, Homo sapiens
ccctgtctctactaaaaatacaaaaattagctggacatggtggtgtgcgcctgtagtcccagactcaggaggctgaggcaggagaatcagttgaacccaggaggcagaggttgcagtgaagccgagattactgttgattactgttacactccaacctgggtgagagagagactctgtctcaaaaaaaaaaaaaaaaaaaaaaaaaaaaagamcaaaacaaaaaaaagcctaaattatacaacaggatccatgggagaacatcttgatagctttttagcaggaacatcacattccaaatgcttgctagctattttctgagtatcagttatatttaccatgatcctgaggagcagaccctttattgtgtcccagttcagtttgcatcgtcttcatacagcataaggcaaca

SEQ ID NO: 1424 - DNA, 471 bp, Homo sapiens
tagaaggagtaggacagtaaatgtaaatgtctgtcctaatggattgttttatacattagagaacaattttttaagtgatcgagtaaacaaagtccccctcctacctccatggtgattgtttctcatagatgaaaacagttttctcatcctgacgacgacaacaacttcttcttcttcttcttcctcctcttcttcttcttctctttttctctttctttcctctttatttttcttctttctttcctcctcctcctcctcttcttcttctgcttcttcttctgctgcttcttcttcttctccttcttcatcatcattatctcatcatcattatcatttcagtgaccagttagtgagcaccttcatgtccaagcactgtctggggtcttcacagatgttatcctaatcttcacaccagtttaatacaagtgtgttaatatatttgatatgagtgctaggatatagtatttggag

SEQ ID NO: 1425 - DNA, 401 bp, Homo sapiens
ataataagatcctgtctctacataaaatttaaaaagttagttgggcatggtggcatgtgcctatagtaccagctactcaggaggctgaggcaggaggatctcttgagccaaagaggtcaaggctgtagtgaactatgattgtgccattgtactccagcctgggtgacagagcaatactctgtctcaaaaaaaaaaaaaaaaaaaaaaaaaggacttcaaatagcttacctatgaagaagctgcttggtaataccttaaatttcccttctatgcttttacacagaaccctaaccttgcagttgaggacttgagtcatctcacaattcttttgggtaaaaaaaatgtaaactactgtgacccaactttctttacagctgggaaggcctctatttgattgaaaa

SEQ ID NO: 1426 - DNA, 426 bp, Homo sapiens
ttttttccaatgtattccagaacccccatggatatcaaaattaaatgctsaaatcccttacataaaatggcatagtatctgtatactttaagcagattacttataatacctaatataatgtgaatgctatgtaaatagttgccatactgcatttttaaaattaatattattttttaatattttaacctttttttttttttttttttttttttttttttttttttttgagasggagtctygctctgtcacccaggctggagtgcattggtgcaatctcagctcactgcaacctccacctcccaggttcaagcaattctacctgcctcagcccccaagtagctgggattgcaggcacaggccaccacacccacctaatttttgtgttcatagtagagacggggtttcgccgtcttggccaggctggtc

SEQ ID NO: 1427 - DNA, 404 bp, Homo sapiens
agagaggctccttccactctcagagcttccaacttaaccatctgtgaagagtaggtccttcaaaaccaactgtagcggcaaagttctgagrtgatatttccagactcagcagataggaacaggcatgctaggtgagatatggcagggaatattagtcagggttctccagagggacagaaccaatttgtgtgtgtgcgtgtgtgtgtgtgtgtgtgtgtgtgtgtgtgtgtgtgtgtgtgtgacagagacagacagaaagagagtgctttagtttaaggaattggctcacaattatggagactggcaaatctaaaatcttcaggctgggttggcagtctagagactcaggaaaagctgatgttgcagtttaagttcataagatttctgttgtcagaattctctct

SEQ ID NO: 1428 - DNA, 425 bp, Homo sapiens
  misc_feature (1)...(425): n = A,T,C or G
nngcagaagatagggtcattgtagagtggaaaaacatatctgaaacatggttgttaagtcataagctaatatttggaaagacagactccacttacttttttccaatagatatatatttactaaaatcttgggaaagctaagcttatgatcaggtgtaaccaggccatatcccttgggtcccaaagtcaataagcagggagagcttggtgtttaagtccttaggaatgggtcatgccactcagaaaagagaagagatgtttcgatctgtggattgttatcatctgcaacccaggaggctctttgattcttcatatcacgttatttttacctgaggattgtagataccctacagtcttaaagcctctggccaatctgccttggaaccacaggatacattaggcaaggtctggggctggctttgacaa

SEQ ID NO: 1429 - DNA, 407 bp, Homo sapiens
tgagatctggttgtttaaaagtgtgtagcacctccccaaccgatctcttccccttttgccttccaccatgattatgagcttcctgaggccctcactagaaatagatgctggagccgtggtggtacagcatgcaggactgtgaatcaattaaacctcttttatttcttaaattacccagcctcaggtatttcttttctttcttttttttttttttttttttttttgagatggactgtcactctgtcactcaggctggagtggagtggctcactgcaaccttcgcctcccgggttcaagcaattcttctgcctctgcctcctgagtagctgggactacaggtgcgtgtgcccacgcccagctaatttttgtatttttggtagagacagggtttcaccatattagccagg

SEQ ID NO: 1430 - DNA, 416 bp, Homo sapiens
gctggagatataaatttagaagacattggaatataggtttaattaaagccagttggccagatgagatcctccatgtaaagattatagatagagaagataagagggatcaaaaccaagccttggggaattccagtattaagagttgccagagaaagaaaccaacaaagacagaaaaagcaatcagtacggtgggaagaaacgtcataaaggcatgaaatgtcataaaggcatttcaggctagagaaagtgtttaattaaagagaagaaagaagaacttccattgcatttggcaatggaggtcacatttgtgatctggacaggatagttgcagagagtaatgagtttaagttgtacatcaaagtaaaagacacacactctggccaaaggaacagccacagaaggctggcatatgatgt

SEQ ID NO: 1431 - DNA, 403 bp, Homo sapiens
tgattttaaaggcccttgaaaacaaaataattatcttattaaaatttagttacatgttgtgtttaaaatgctaaagttttggccagcygcagtggctcacgcctgtaatcccagtactttgcccgagatgggcagatcatgaggtcaggagttcaagaccagcctgaccaacatggtgaaaccctgtytytactaaaaatmcmacaacaacaacaacaacaacaacaaattagccaggagtggtggtgcgtgcctgtaatcccagctactcaggaggctgaggcaggagtatcgcttgaacccaggaggcggaggtcgcagtgagccgagattgcgcaacagagtgtgactcagtcttaaaagaaaaaaaaaaattctraaatttatcggagaaaacaattgg

SEQ ID NO: 1432 - DNA, 401 bp, Homo sapiens
tggtgaaaccctgtytytactaaaaatmcmacaacaacaacaacaacaacaacaaattagccaggagtggtggtgcgtgcctgtaatcccagctactcaggaggctgaggcaggagtatcgcttgaacccaggaggcggaggtcgcagtgagccgagattgcgcaacagagtgtgactcagtcttaaaagaaaaaaaaaaattctraaatttatcggagaaaacaattgggatctatttttagtctcaaatgtaggcatatacaaaaataatacatagtagttttctaagtactattagacatttgtttcccattttgccatttgctttcagtttacctgacatgaagataaaaatgatagctatttctcacttggcatttgaaagacaagagcaataaga

SEQ ID NO: 1433 - DNA, 402 bp, Homo sapiens
tagagaaatattagtaggttagttagtattcctaataaagaactgctaataccttatagagacataagccatgtttctcgtctttcgtttctgaaatgaaattttggccagggaaacattttgcatccctttttgatgtctacaaatgtggcatttgtcagatgtgagatagttaagtgtgtgtgtgtgtgtgtgtgtgtgtatatatatactttatatatgtatatatacatatcctatgtgtgtgggtatatatatatatatatatatatatatatatatatatgaatgatgcatggagagatatctcttcccwtgcatccaaaatattcacaacttttcactaatatctgaataacatttgaaaaattgacaactcttctggctaaagatcagcataca

SEQ ID NO: 1434 - DNA, 401 bp, Homo sapiens
tcgtttctgaaatgaaattttggccagggaaacattttgcatccctttttgatgtctacaaatgtggcatttgtcagatgtgagatagttaagtgtgtgtgtgtgtgtgtgtgtgtgtatatatatactttatatatgtatatatacatatcctatgtgtgtgggtatatatatatatatatatatatatatatatatatatgaatgatgcatggagagatatctcttcccwtgcatccaaaatattcacaacttttcactaatatctgaataacatttgaaaaattgacaactcttctggctaaagatcagcatacacattcgttccacagagacttgtgccaaaatcttgctcagctcaaggggtactgcacaataaacaataagaaacttttataact

SEQ ID NO: 1435 - DNA, 402 bp, Homo sapiens
ggaaacattttgcatccctttttgatgtctacaaatgtggcatttgtcagatgtgagatagttaagtgtgtgtgtgtgtgtgtgtgtgtgtatatatatactttatatatgtatatatacatatcctatgtgtgtgggtatatatatatatatatatatatatatatatatatatgaatgatgcatggagagatatctcttcccwtgcatccaaaatattcacaacttttcactaatatctgaataacatttgaaaaattgacaactcttctggctaaagatcagcatacacattcgttccacagagacttgtgccaaaatcttgctcagctcaaggggtactgcacaataaacaataagaaacttttataactccgactaatagaactcattgcttttcca

SEQ ID NO: 1436 - DNA, 401 bp, Homo sapiens
cataggcatggacaaggacttcatgtctaaaacaccaaaagcaatggcaacaaaagccaaaattgacaaatgcgatctaattaaaytaaagagsttmtgcacagcmaaagaaactaccatcagagtaaacaggcagcctacagaatgggagaaaatttttgcaatctattcatctgtcaaagggctaatatccagaatmtaacagtgaactcaaacaaatttacaagaaaaaaacaaacaaccccatcaaaaagtgggtgaaggatatgaacagacacttctcaaaagaagacatttatgcaaccaaaagacacatgaaaaaatgctcatcatcactggccatcagagaaatgcaaatcaaaaccacaatgagataccatctcacaccagttagaatggca

SEQ ID NO: 1437 - DNA, 420 bp, Homo sapiens
caagcattcatagcatagtatatcatgtagcagggtttaaaataagcatagaagagggtttcgccaaaagattatttaagaaaatctactaaaagagggttcttctgaaaaataaaatgtatttgcttttatcaaatgagcaaacttcatccacttggagatcacccacatgtgaatttctttctttctttctctctttcccttccttccttccttccttccttccttccttccttccttccttccttccttccttccttccttcttactttctttctctgatggtaagttacattagaggacaggaaggctcagtgatcagttttgatgggatggctgcacagaggcacatggagaagaagcaaggaagccaccttcagcttctgggtctctttgttatacaggaaaggaagtcaactg

SEQ ID NO: 1438 - DNA, 408 bp, Homo sapiens
accagcctggccaacatggtgaaaccccgtctctactaaaaatataaaaattagccgggcgtggtggcacatgtctgtaatcccagctattttggaggctgaggcaggagaaccacttgaacctgggaggcagaggttgcagtaagccaagatcgagccactgaaaccccagcctgggtaagagagtgagaccctgtctcaaaaaaaaaaaaaaaaaaaaaaaaaaaaaaatacttggtgcacttatgaaagcctgcagagcccagaaattctgatttaattgatctaagaaaagggagaggtaaaagctcccaggaaagtctagtgcccagccaaaggccatgggagtgatgagtgaccctgcccacacctaacggagcgtcccctgctctgctagtcagtcaacag

SEQ ID NO: 1439 - DNA, 408 bp, Homo sapiens
tgataggaggttctcataacagtccaaatgagaggaccaaaaggcctggagtcacgtcattgcagtaaaatggaagaaaaaacaagagtataaatgaagtgtcaaagatgttaagaaacaggatcttttaaaaaattatttttaattattatgggtacataataagtgtatatatacatggggtacatgtgaaattttgaaattttgatacatacaatgtataataatcttatcggggcaattggggtgtccatcacctcaggcatttatcatgtcttrtattagaaacagtccaattctcctcttttagctatttgaaaatatacaataaattattgttgagtatcatcactctgttgtgctatcaaatactagatcttattctttctatctaactatgcttttgca

SEQ ID NO: 1440 - DNA, 401 bp, Homo sapiens
ctcctcccaaaatgttatagacgtgagctaccacacccagccatgagtgtacattataaataaataccaataatgtactttcacatatgaaaaggctataaaagtatgcaaatatattatggcaacatctgttaagggataaagtgacacactgttgctcataactcgaaagaatatatatatatatatatatatatatatttttttttttttttcttttgaaacggtgtctcactctgtcaccaggctggagtgcagtggtgcgatctcagatcactgcaacctccgcctcctgggttcaagtgattctcctgcctcagcctcctgagtagctgggactacaggcatgagccaacatgcccagctaattttcatatttttagtagagatagggtttcacc

SEQ ID NO: 1441 - DNA, 407 bp, Homo sapiens
caccctgtcagagccctcaaagtcagacaaagaaggatgaaacatgttttggtccttaataaagaactgctgattgactgtttgaaaaacaaatgccgcacacctgtaatcccagtgctttgggaggccaaggcaggaggattgcttgagcctaggagtttgagaccagcctgggcaatatgatgaaacctaatctctacaaaaaaaaaaaaaaaaaaaaaaaaaaaagagccgggcatgaacctgtagtttcagctacttgggagactgaggtgggaggatcgcttgaaccctagaggcagagttacattgagctgagattatgccattgcactctaccctagggtgcaagattctgtctccaaaaaatgaaaaacagctgtatggtttggagagccagtggctga

SEQ ID NO: 1442 - DNA, 404 bp, Homo sapiens
gagtagttattgctgaatgtgtttggggtttcagtatgtggtgaaaaattctggatacagatgctcacatgtcattgtgggtgtctttcatgcaactgaattaggttttttttttgtttttgtttttgtttttttttttcagataaaccatgaatcacattttatttattttgtcctttcatttttttttttttttttttttttgagacagagtcttgctctgttgccaggctggagtgcatggtatgatctcggctcactgcaacctccacctcctgggttcatgctattctcctgcctcagcctcccgagtagctgggattacaggtgcccaccatgatgctcagctaattttttgtatttttagtagagacggggtttcaccgtgttagccaggttggtct

SEQ ID NO: 1443 - DNA, 417 bp, Homo sapiens
tcctgacctcgtgatccacccacctcggcctcccaaagtgctgggattacaggcatgagcctcaacttttattttacgttcagatggcacatgtgcaggtttgttacatgggtaaattgcatgttactggggtttggtgtacaaattattttgttacccaggtggtgagcatagcatagtacccaataggtagtttttccctttttttttttttttttttttttttttgagacagaatctcgctctgtcgctcaggctggggtgcagtggtgcratctcagctcactgcaacctccgctcctgagttcaagcgattccccctgcctcagcctcctgagtagttgggatgacaggcacctgccaccaggcccccataatttttgtatttttagtagagatggggtttcaccatgttgg

SEQ ID NO: 1444 - DNA, 401 bp, Homo sapiens
agtgtttaactcatcaatttcagatacacagtaaaagaatgtatatgagaattggtcaaggacattctgaggctttaagcttcaagtcaagaaaaacaactgcctttctgaaaacttacaccgctcacagagtctggtgggctatgaatttgatggtacaacttctaacttgacagtgtggagatcaagggtataggaawggtaaaaagctttgaaaagtttgagagtggagtttgcacagctggacacagggcaccacaaacacaggtggtgcatttgtgcctttggtggacaaagtatcacccacaatgcacaggcgcttccctggctggacaataggtctctctctccatcccctctctctctgtttcaagagaagacattttacgtaggaccttcca

SEQ ID NO: 1445 - DNA, 404 bp, Homo sapiens
ttgactctaaatcttcatttgtccttgttgtcttcaatgtcgaggccaatctctttcccctaccataatatctctattgaaatagtcctgaacaaagtcttccttgccattttcacacgtgccagaataatgcttgcctccctgcctgcctgccttccttccttccttccttccttmcttmcttccttccttccttccttccttmtttcyttccacagaatctcgctctgtcacccaggctagagtgcagcggtataatcaaggctcacagcagcctsggccttccaggctcawgtgatcctcccagctcagcctcccgagtagctgggaccacaggcacatatcagcacgcttggctaattcttttttgccttttgtttgtttgtttgtttgtagagacaaag

SEQ ID NO: 1446 - DNA, 402 bp, Homo sapiens
ccagcctggccaacgtggtaaagccctgtctytgctaaaaatacaaaaattagccgggcgtggtggctgatgcctgtaatcccagctactcagaaggctgaggcaggagaatcacttgaacccgggaggcagaacttgcagtgagccagattgcaccattgcactccagcttggggcagaaagaagagaaactcagtytccacaaaaaaaaaaaaaaaaaaaaaaagagaaaagaaagaaaagaaaagatgaacatgtaacttacacaaaacacttgttgccatttaccatggggatataatgaactaacattcagaagtcacacatatgctgaagaagcatcaggatctacttcaaaagttaaaaacattaaaaaaaaacacagaaaaaaagagtgcatct

SEQ ID NO: 1447 - DNA, 405 bp, Homo sapiens
tgctaaaaatacaaaaattagccgggcgtggtggctgatgcctgtaatcccagctactcagaaggctgaggcaggagaatcacttgaacccgggaggcagaacttgcagtgagccagattgcaccattgcactccagcttggggcagaaagaagagaaactcagtytccaaaaaaaaaaaaaaaaaaaaaaagagaaaagaaagaaaagaaaagatgaacatgtaacttacacaaaacacttgttgccatttaccatggggatataatgaactaacattcagaagtcacacatatgctgaagaagcatcaggatctacttcaaaagttaaaaacattaaaaaaaaacacagaaaaaaagagtgcatcttaaaatgacttaacacacacaactgcagaaggtggag

SEQ ID NO: 1448 - DNA, 402 bp, Homo sapiens
ccttgatgcaaatcaaaagactagatgtagctaattagacatgggaaaagggtggttctcctgaaaatctggggcctcaggcattttctggaatgtgtacagtcagaacgtgcaagttagtcagcaaagagaaaacaagcagccacacctctcccaaataccgaatagtcatccttcttttgtggttcagaggtgtttgtttgtcttakaatgctgcaacttaaaaccaattgattttaaataaaaatggtaacattataaagtgtgaaagtgtggggttaggaatcatttcccaccctgtgaaaatggctctatggtcacccgggtgtgtgtgtgtgtgtgtgtgtgtgtgtgtgtgtttgtgtgtttaacctgtgagataagaatggtcaaccagttgac

SEQ ID NO: 1449 - DNA, 401 bp, Homo sapiens
ttttctctatttcatggataatccatgcagtgtttgctcaacctgtttacactgagatgtgttgaggaactgtcccacggcaagaccacaaggtggggcagtaatgagtaattggaagaaaactgcggtaccttctaaagctcaaatgtggctttctagaacmcgatgaagtggagccctacattcattatttgaccttggttgttttttttttttttttttttttttgagacagaggagtctcactgtctcccagactggagtgcaatggcatgatctcggctcactgcatcctccgcctcctgggctcaagcgattctccagcctcagcctcctgagtagctgggactacaggcgcaagccaccatgcccagctaattttttttttttttttttttttt

SEQ ID NO: 1450 - DNA, 401 bp, Homo sapiens
ctctatttcatggataatccatgcagtgtttgctcaacctgtttacactgagatgtgttgaggaactgtcccacggcaagaccacaaggtggggcagtaatgagtaattggaagaaaactgcggtaccttctaaagctcaaatgtggctttctagaacmcgatgaagtggagccctacattcattatttgaccttggttgttttttttttttttttttttttttgagacagaggagtctcactgtctcccagactggagtgcaatggcatgatctcggctcactgcatcctccgcctcctgggctcaagcgattctccagcctcagcctcctgagtagctgggactacaggcgcaagccaccatgcccagctaattttttttttttttttttttttttttt

SEQ ID NO: 1451 - DNA, 405 bp, Homo sapiens
tgttttttttttttttttttttttttgagacagaggagtctcactgtctcccagactggagtgcaatggcatgatctcggctcactgcatcctccgcctcctgggctcaagcgattctccagcctcagcctcctgagtagctgggactacaggcgcaagccaccatgcccagctaatttttttttttttttttttttttttttttaggagagacgggatttcaccatgttggccaggatggtctgaaactccggacctcaagtgatccacctgcctcggcctcccaaagtgctgggattacaggcatgagccaccatgcctagccctgtgactttttctcaagggcttcaaacagtccctctgcaagttaacctaggcatactcacagagcaagaaggcattcat

SEQ ID NO: 1452 - DNA, 405 bp, Homo sapiens
cttctccttttcatacaggttattgtttataagagcaatgtgatgaaagcttcctctgctaagactgcaactccagcgttaccttttctttacctcaccttgatcctcggtgtgaaacttcactcattactgatgcattgcaattaacagatctcctctttcaagacacattagggtatgttctgactatcagctccaaaaaaataaaataaaataaaataaaataaaacacattaggaaatttaaatgaattagtgtaatcagctgagatagtacttgaaagggaccgtgtaggcttgtggtggaataggtactttcagacagaagtctctagaatattcctgaggaagtattttctcctgcccttcaatgaatagagtggtaaggtttgtgaaaagcaggcct

SEQ ID NO: 1453 - DNA, 405 bp, Homo sapiens
ctaagtgatttacaaatgattattcttctgaccctcatcacaattctatgagagcagtctattattttcaccaatttatagaaaaggaaactgaagcatagagaattgaatacattttctttgatgtcatagcaagtaagaaaaaaggctaggattctaatccagggagtctggctccacaacaggtgcaattaaccaccagaccgtgaggcctctctgtcatatgcaagctcgtctgttttgctcagaagactgtgttttactcactcactcccaacttcttatggtaaaaattgctttttaatgatttaaataatacatgcccatgtaaaagttaaatcaatgactaaagcattctgaagaaaggaaaggttacctggaatcccatgaccctgaaataaccat

SEQ ID NO: 1454 - DNA, 405 bp, Homo sapiens
catcagacttcagaggaattcagacttaaaattcatgtgcctttgaatggggaccacatacatgtcacatcacactaacactaatgtttcattgattcattctatcccttcccaggaatcaaattctgattaagagaaagaccctaagtggctgaaggaacaaaaagagttattgcaaaaaaaaaaaaaaaaaaaaaaaaaaaaagctgatgcagttaggaaagggaagcctgagctattaagaaaaacacattgcttcttacatagtagtgctaaaggccaagcctgcatatccctgcaatctataaagtctgttttctctgacagtgtcagagttggaaagatcaataggtgtcactcacaccattcatcatctcagaaatgagaagatttaggaaaggagat

SEQ ID NO: 1455 - DNA, 409 bp, Homo sapiens
tactccaactactgatatatcaaagtgtctgttcttgtatcattatcaaaattttaatatttaattatctgatgagtgaaaaatgacatctgatagtcctgtcagttagtattgcttttaatgtgactaatttttagcttttattcatgtttaaatgaataaaatgtactccctttactacttttttttttttttttttttttttttttgagacagggtctcaccctgttgcccaggctagagtgcagtggcgtgatcatggcccactgctgccttgacctccagggctcaagcaatctgcccacatctgcctcctgcctgtgttgctcagactggtcttgaactcctgagctcawgcagtctacctgccttagcttcgtaaagtgctggaattacaggcgagagccaa

SEQ ID NO: 1456 - DNA, 414 bp, Homo sapiens
ttaacataatgacatccagttccattcatgttgatgcatataacagatttcattctttttatggctgaatagtaatccattgtatgtatatacacatataacgtctgtatatataatgtgtatataaaatgtatatccataatatatgtatatatacacatatatgtaatatatatwgtgtgtgtgtgtgtgtgtgtgtgtatatatatatatatatatatatatatatatatatatctcacttttttttttgagacagagtcttgctgtgttgcccaggctggagtgcagtggtgcaatctcagctaactgcaacctccacctctcggttcaagggattctcatgcctcagtctcccaaaaagctgggactacagtcatgtgccaccatatccggctaatttttgcatttttt

SEQ ID NO: 1457 - DNA, 406 bp, Homo sapiens
tgtggagcttccccagcccgctcagkctgcccccagtcttcccatttttagaaaaattaaaactatggtttgttaaagcttctattctgatggtctctgttacttgtagctgaacgcaatgaattgtgagatacgatttaccacaatttttttctttctttctttcttttttcttcttcttcattttttttttttttttwttttttaaagggttgtgccatgtcacccaggctggagtgcaattgtgcgatcatgactgactgtggtgtcaacctcccaggctcaagcaatcctcccacctcagtctcctaagtagctgtgactataggcatgtgccaccatgccaggctaatttttgtattttttgtagagatggggtcttgctgtgttgcacaggctggtctca

SEQ ID NO: 1458 - DNA, 449 bp, Homo sapiens
tgcatctgtattgccatcaccctagttctggccatcctcactgaccacctgactttctgcctaaatggtctcctactttctggtcttgtatactttcaaccctttctctgcaatcagagtgatattgcttccartgttgtacagacaattcttacaaggtcctgcagcttttctttcagtctttctttcttttttttttttttwttttgaaatggagtctcactctgtcacccaggttggagtgcagtgggcgcgatctcagctcactgcaacctctgcctcccaggtttaaacgattttcgttcctcagccttccaataactggggttacaggtgcatgccaccatgcccagccaatttttgtatttttagtagaaagagggtttcaccatgttggccaaactggtctcaaactcctgacttcaagtgatctgtccaccttggcctcc

SEQ ID NO: 1459 - DNA, 402 bp, Homo sapiens
accagcctgggcaagatggtgaaacgccgtctctactaaaaatataaaaattagccaggcacagtggcaggtgcctgtaatcgcagctacttgggaagctgaggcagagaattgcttgaacctggaaggcagaaaagttgcagtgagccgagatcatgccactgcactccagcctgggcgacagagcgacactctgtctyaaaaaaaaaaaaaaaaaaaagaaagaaaaaagaaatgagcaagcactgaacacctactgtgtgcaaggcacttgatagccttcctgttatttcttcctcactacaatcccatgaagtagttcttatccccattttacaagatacaaaaattgactctcaaaaagcttaagaaatttgcttctagttgcacagtcttatagat

SEQ ID NO: 1460 - DNA, 402 bp, Homo sapiens
ctggttttcagactagaatttataccattggctctcctggttctcaggccttcagatttagactgaaactacactatcagcattcctgagtctccaaattgctgactgcagatcttatgactttccagtcattccattccttgtcataactctctttctctttctttctctctctctcctctctctctctctctctctctctacatatatatatatatatatatatatayatacatatatatatatatatatatatgaacagatacatcctattggttctgtttctctggagaaccctgactaatatacagttatgtgtcacttaacaataggatataytccaaaaatgtgtcattaggcaatttcatgatttgtgaatatcatagaatattcttacacaaa

SEQ ID NO: 1461 - DNA, 402 bp, Homo sapiens
tctcctggttctcaggccttcagatttagactgaaactacactatcagcattcctgagtctccaaattgctgactgcagatcttatgactttccagtcattccattccttgtcataactctctttctctttctttctctctctctcctctctctctctctctctctctctacatatatatatatatatatatatatayatacatatatatatatatatatatatgaacagatacatcctattggttctgtttctctggagaaccctgactaatatacagttatgtgtcacttaacaataggatataytccaaaaatgtgtcattaggcaatttcatgatttgtgaatatcatagaatattcttacacaaacctggatggtttgctgcacacctaacctgatg

SEQ ID NO: 1462 - DNA, 403 bp, Homo sapiens
tgaatgctaatggtattcttctagtctagtgcattcaattaaaatataacgtgtgttacatatgaagttaaaaatgtttagtaaccaaattaaaaaggtaaagagaaataagtgaagttaattttaataatatattatctttaacctcttttaataatatactctctttaactctttaatatatttaataatatattctcttttatatacatagaacattgtcatttcaacatgtaatcaatataaaaaatatcaattagatattttacattctttttttcacattaagtctttgaaatttagcacgtattttacacttacagtacatcttaatttggactagatgcatttcaggttcccaatagccatatgtgtctattggcgttcgtatcatatttatcat

SEQ ID NO: 1463 - DNA, 407 bp, Homo sapiens
tgtgtttttattattttttctgataataaagattaatgcagatacatgaaaaaaacaaaacataaaaagtaggaacagaaagtcaaatactgcatcttctcacttataaataggagctaaataatgtgtacagacaggcataacagaacggaacaatagacactggagacttggaagggtgggtgagtgagcagggttgagggatgaaaaattaccttagaggtacagtgtacattatgtggatgatgatttcactaaaaccccagacctcatcactatgcaatatatccacataacagaactgcacttatacccataaacttatatttaagaaaagaaatagaaaaaagataatttttttaaagtagaaagagggaaaaaagtaaagcatcatcccaatttctttc

SEQ ID NO: 1464 - DNA, 404 bp, Homo sapiens
gaaccactaaagtctagagcacataggctagaggctagaataagtgagaaatagctaatcctaggaagataaattggggcttaattgtaaaaacctttgcatgctatactaagaagctttgagttcattctcttggcaactatgagccattacatgtttcaaaagatagatctgatggaaaaacagaagtatagagggtaggtaatattctaatgtgtaaacttctactgtgagtccaaaagaatatggtatctatctctgaaccatgttcaatattttgcttagactgttcgaactatgtaagaataagaaatactaaagtgttttttctctgatataatatttaaataccttttagctatcaattccttctaatttccctttaataagacatttactacaaa

SEQ ID NO: 1465 - DNA, 401 bp, Homo sapiens
tttttgacatgtattatttgatgaaaccctatgagattaggtctttacttccgaaagaagaaaaccaaattcaagggcaattaaaaacttgtcaaatgtctcaattttagtaagaaaaaaaaccgacattggcctagatcttaatctgtgcccagtcctcttcccatccctctttttttttttttttttttttttttggkgggctgctctcaaatttttgggctcaaatgaacctcctaccttggcctcccaacgtgctgagattacaggcatgagccaccgtgcctggccagctaaggttaatttagtattgaaraaatatttttgttatgaatttagtgtagccaagtgtgcagtgtttaraccatctacagtaatgcacattaatggcctaggccttc

SEQ ID NO: 1466 - DNA, 402 bp, Homo sapiens
ctgaggaactcaatcaacaggattgcaacatgctttttttaaacctcttgaaagatcacatcactacagaataaggaaacctatttatttatttaatttgagacagtctctctctgtcacccaagctggagtgcagtggaatgatctcagctcactgcggcctccaccccagttcaagcaatttcatgctcagcctctgaatgtaagctgggactacaggggcacaccaccacgcccagctaatttttttgtatttttagcagagacaggttttcaccatggtggccacgatggtctggaactcttgacttcaagtgatctacccacttggtctcctgagggaaatctatttatgactaatgctgttctttttactaattgtttcattggctgtcagccctt

SEQ ID NO: 1467 - DNA, 401 bp, Homo sapiens
ggaactcaatcaacaggattgcaacatgctttttttaaacctcttgaaagatcacatcactacagaataaggaaacctatttatttatttaatttgagacagtctctctctgtcacccaagctggagtgcagtggaatgatctcagctcactgcggcctccaccccagttcaagcaatttcatgctcagcctctgaatgtaagctgggactacaggggcacaccaccacgcccagctaatttttttgtatttttagcagagacaggttttcaccatggtggccacgatggtctggaactcttgacttcaagtgatctacccacttggtctcctgagggaaatctatttatgactaatgctgttctttttactaattgtttcattggctgtcagcccttaga

SEQ ID NO: 1468 - DNA, 405 bp, Homo sapiens
ttctttctgaaggggttctgtcactaacaggttgcattacttgtacaaccattatatctgaatcttcccagaccgtggtttttttttgtttgtttgttttgttttttattaaatactgtcattaaaccagaactcatggatatctatgtcatttccagctataaaattctagaaacttggggattttacctttttgtttcttattttattttcttttttatcaaaagccttatcacaggtaaaatggtaatctaagcaagaataagctctgtcatgatttatgaagcatggaaattcagctgtggccaggcacagtggctcacatctgtaatcccggcactttgggaggccgaggtgggtggatcacttgaggccaggagttcgagaccagcctggcccacatgg

SEQ ID NO: 1469 - DNA, 404 bp, Homo sapiens
ctttaacatttctctgaataacgtgaaccttccttatttccttaaaatataaacttatatatgttcttcctaggagattttcaacttttctgttctccacttattactctattcactctgttctctatctgagctgtcactaattagtatctacttaaataaatatttgagcaatttaacattacagtttttttttttttttttcagcaagaagtgtgttcattatccattaaaagcctgggagagggactactaatgttacaccatcaatatctatttttagccacttcggttttggaagtgtctcttcttttggaagtgggagaccaagtggaggggaagaacatgaacaagggattgaagccattgagaaagtcatttattcattcgatagatatcttctg

SEQ ID NO: 1470 - DNA, 403 bp, Homo sapiens
ttgaaataaaactgactatggtaagaagagtttttctgggagttgggaaactgattccattagaaggcagatggtgatagtctcacagcacactctctcccatgcggtctctattctacaggcatgcagatatttccaaaagcatcccttccctccagggtcctgaagaccctacctctggttctgccttggactgctcttctcagtgatattccctttttttttttttttttggacggagtctcactctgccgccaggctggagggcagtggcaccatcttggctcactgcaacctccgcctcccaggttcaagtgattctcctgcctcagcctcccaagtagctgggactacaggcacgtgccaccacgcctagctaatttttgtgtgtgtgtgtgttttt

SEQ ID NO: 1471 - DNA, 401 bp, Homo sapiens
gactatggtaagaagagtttttctgggagttgggaaactgattccattagaaggcagatggtgatagtctcacagcacactctctcccatgcggtctctattctacaggcatgcagatatttccaaaagcatcccttccctccagggtcctgaagaccctacctctggttctgccttggactgctctcagtgatattccctttttttttttttttttggacggagtctcactctgccgccaggctggagggcagtggcaccatcttggctcactgcaacctccgcctcccaggttcaagtgattctcctgcctcagcctcccaagtagctgggactacaggcacgtgccaccacgcctagctaatttttgtgtgtgtgtgtgttttttttagtagaggtgg

SEQ ID NO: 1472 - DNA, 403 bp, Homo sapiens
actgctctcagtgatattccctttttttttttttttttggacggagtctcactctgccgccaggctggagggcagtggcaccatcttggctcactgcaacctccgcctcccaggttcaagtgattctcctgcctcagcctcccaagtagctgggactacaggcacgtgccaccacgcctagctaatttttgtgtgtgtgttttttttttttagtagaggtggggtttcaccatgttggccgggatggtctcgaactattaaccttgtgatctgcccacctcggcctcccaaagtgctgggattacaggcgtgagccactgtgcccggccgatattcctgtttttatggttgcaattgtatgctatggcaccggtactatgtgggaagaatgatgctaggtact

SEQ ID NO: 1473 - DNA, 408 bp, Homo sapiens
agaccatcctggccaacatggtgaaaccccarctctactaaaaatacaaaaattagctgggtgtggtggggcatgcctgtagtctcagctacttgggaggctgaggtaggagattcacttgaagccgggaggtggaggttgcagtgacctgagatcacgccactgcactccagcctggtgacagagagagactctgtctcaaaaaaaaaaaaaaaaaaaaaaaaagtgcctactcataccctcctcctatttattctgatttctgtgcatgtattctttttgtttgtttgtttttcagagacaaggtcttgctctgtcacctaggctggagtgcagtggcacagtggcatgaccatagctcactacagcctcaaactactcctgggctcaaaatgatccccctgcctc

SEQ ID NO: 1474 - DNA, 403 bp, Homo sapiens
cccatttctaaaaaataatatcttttaaaaaattaactgggcatgkcggtgcgtgcctgtagtctcacctacttgggaaactaaggagggaggattgcttaagcccaggatgtcaagattgcggtgagctatgattgagccactgcactccagcctggaggacagagtaagaccctgtctcaaaataaaataaaataaaataaaattagaaaggataggtgtgtktgggagggagactggttaaycagggtgcatgggattatgtagggcttgtctttcatttgagttcttctctgtctttttaaaatgactgattatatatattaggtcccaatggcttcattatcactattattttaattcataggttaaattttataaacatgaaaaataattgacaagc

SEQ ID NO: 1475 - DNA, 405 bp, Homo sapiens
aggcctcaggaaacttacaatcatggcagaaggagaagcaaacacatccttcttcacatggcggctgcaaggagaagtgctgagcaaaaaggggaaaagccccttataaaaccatcagatcctgtgagaactcactcactatcgtgagaactcacttactatcatgagaacagcatgagggtaacagcccccatcgttcagttcaattacctccgaccaggtcccttccatgacacatggggattatggggactacaattcaagatgagatttgggtggggacacagccaaaccatatcagaaggtaaggcctattttagtaagttttgtttatgcaaactcatctcagtgttgactccctatctttataacatgggtcacttttttcttcctgatggtgtgggg

SEQ ID NO: 1476 - DNA, 410 bp, Homo sapiens
catgcccaaataatttttatattcttagtagagatggagtctyaccatgttggcaacgctagtctcgaactcctgacctcaaacgatttacccacttcagcctcccaaagtgctgggatcacaggtatgagccaccgtgcctggcctatacttgtgtatactttgaattgtttcttttttcttttcctattttattttattttattttatattttattttattttattttttgygacagggtctggctctgtcacccaggctggagtacagtggtgcaatcatgactcactgcagcctcaagctcctgtgctcaggtgatcagcctcctaggtagctgggactacaggtgaccaccatcacacccagctaatttttgtattttttcatagagatgaggtttcaccatgtt

SEQ ID NO: 1477 - DNA, 408 bp, Homo sapiens
tgttccaattcatggagcaaccagacatacatgttcaaayaattatgaaaaacatacaacagatatttatcaacaaatacatcagtaaacaaacttacatgaccctgcttggccatcactgtttcttttcaacacacacacacacatttacaaatacatatatatgtgtgtgtgtgtgtctgtctgtcgatatatatgtgtatatatatatatatatatatatatatatatatatatataaataaaataaataggtaagagctgcttatagccctgaatccccacagaaaaccccgtctgtctttagtttcatgaaagcattgtactttttctcattatttttcagaccatcacagacacttctgatcagtgttccacttaagcttagccccaaatacacagaggaat

SEQ ID NO: 1478 - DNA, 404 bp, Homo sapiens
attcccaagggtttttcatttcactgtacggacaaagactagaatctgccattaagttgtttagttcttaaactgaataaagacatgagttcatatactattcacatgaagagtgattgactagcagtgagtgaagttaatcctcatcatctcaaagctgattgtaatctttactgcagtgaattttatcgtgtgtatgcgtgtgtgtgtgtgtgtgtgtgtgtgtagacattcaaagggtgtttctgaataatataactagtatcttataatcatagaattttatatgctgaacatttttagagattatttgtgtcacttcctaagtgagaaaaggcaggtctggaaaagtgaagtgacttgcccagtgtcactacaaccaatcagtagcagtgctgagacta

SEQ ID NO: 1479 - DNA, 400 bp, Homo sapiens
ctctgggctgttctgcattagagagaactcaagagccctggaaattataatttcagaagtattgataatattaaacaacatcaaaaatttttaccacttttgcctgcccttcttacttttttcacaagttaattgaagatggaaggcagtaaagcctcgtgattctttttcaaaaaggttaaaawacaatataatcyatcttttttttttttttttttttttgacacagagtcgtgctcttgttgcccaggctggagtgcaatggcgcaatcttgactcaytacaacctccgcctcccaggctcaagcaattctcctgcctcagcctccaagtagctgggattacaggcgtgcgccaccgcacccagctaagttttgtgtttttagtagagacggggttt

SEQ ID NO: 1480 - DNA, 402 bp, Homo sapiens
tattaggggctraataccaacaacataagtcagaaaagggtttacattgacccctttggattctaaatattgtaataaatattattagttccgaaatatcatatctgtttgatttcccaaatgattgcagaaawgcttygatctttttagtcctatratattgtagagatatctcactaaygatgttttttttttttttktaagatrgagtctcgctgtgtcgctcaggctrgagtgcartgagccatgtttrtgccactgcactgtagcctgggtgacagagcgagaccctgtctacaaaaaaaaaagaaaagaaaagaaaagaaaaaaagaaatgtaattcactttcttctggtcagcagctgacaggatagaacacattggactagaaacctgttgtat

SEQ ID NO: 1481 - DNA, 401 bp, Homo sapiens
taggcaaacaagaaagaatgcatacagttttatcartttatctgagattttgtgataagctacagaccaagtcaaatggactagttttggcaggggcttgctgtccatatgatggtcagttagcttttttctgagttaaacttgaaaactaagaactttaagaagtgcatgggtatatataggtgtgtgtgtgtgtgtgtgtttgtgtgtmattttacaagactgtagaattataaaatgacatttgttttaaggaatatttgattgacagtttcacttaccaacgttagcctctaattatgacactgaggatacccaaatttaaaaatttcctttataatggtccctgagacctggtgattgaggtcataaaaaaggaatggtagttttctttcagaatt

SEQ ID NO: 1482 - DNA, 401 bp, Homo sapiens
gcaaacaagaaagaatgcatacagttttatcartttatctgagattttgtgataagctacagaccaagtcaaatggactagttttggcaggggcttgctgtccatatgatggtcagttagcttttttctgagttaaacttgaaaactaagaactttaagaagtgcatgggtatatataggtgtgtgtgtgtgtgtgtgtttgtgtgtmattttacaagactgtagaattataaaatgacatttgttttaaggaatatttgattgacagtttcacttaccaacgttagcctctaattatgacactgaggatacccaaatttaaaaatttcctttataatggtccctgagacctggtgattgaggtcataaaaaaggaatggtagttttctttcagaatttta

SEQ ID NO: 1483 - DNA, 401 bp, Homo sapiens
gttcagagttcctctgcaggactgcgtggtgacagcacaccacaggtggcccattcagcactgtcatctgggacagcaaggataccctgctccatttgtcatcctatggaattctgtcagcagttgaaagcctttcagcacaaaacctttaacattcgaggcaaacttcctaattttttttttttttttttttttttttttgaracagagtttctctctgtcacccaggcttsagtgcggcagtgcaatctcggctcactgcaaccaccacctcccaggttcaagcgattctcctgcctcaacctcctgagtagttgggattacaggggcacgccaccatgcttagctaatttttgtatttttagtaragacggggtttcaccatgttggtcaggctggtc

SEQ ID NO: 1484 - DNA, 416 bp, Homo sapiens
gcactagtttaaacaattatttatttatgttaccatttctttatgttagtttcaaaagtaacttagaataaaatagttactgttatttgtttaaatatttattttgagatataacaactcaactataggataaatatgtgtttgtatatatatatgtgtgtgcgtgtatatacatatatatataaaacttaaggcaaaacatatatatatatatatatatatatatatatatatatataaaacttaataacttaaggcaaaactgggaagtttggatagatgttcgtggcttcctgaagttttgaacatcattcctaaaagacccaattcacattgtacataattatataaaccaaaccatgtatttgtcctattgtgaactggacacatataacttctgatcctggagctttcaa

SEQ ID NO: 1485 - DNA, 402 bp, Homo sapiens
tgaaaacgtgattttaaaaaaaatgagatttatccgtaaacgagggctaggctacagttggtagggcggctgtcaattcttctacggagttttaacctacactcaatggatgcatgaaaaaaagaaatgaaatgatttttttagctactttaaaaaataaaggtaatgaatatttcttatctatatgcatatatatatatatttcattataattgttgcttctgcagaaaattgggatagaaatctcagatgagctgtagttacacggagatctacagcaatgcaatgtttagctagcatgcattttgtcatccaaggctagtaggtgaaatatttcctttacctgtcttgatgcacggtggagaaakgagacccgcttcgttttccctctaatctagagag

SEQ ID NO: 1486 - DNA, 401 bp, Homo sapiens
ctttctctgctaatagatctataaaatgtggaaagagatgttttacaatctctcatagcaatcctattttttgttttacataatttgatgcttttatatgaaacataaagtttcatggctattataaattttatgtagattttgcctttcatgaatataaaatgaccttcttttctatggaaaccttttttttttttttttwaccttatattaaattttgtttgaaatcaaaggggccatcctttctgtttttaaaatttcatttgtctggtaagcctttgcttattctttcaaaacatttctcattttaatgtgtctctttaagcttaaatagcgtatgtctagatttttaaaatctttttttaaatggggagttgaaataacttaaatgtattatcata

SEQ ID NO: 1487 - DNA, 400 bp, Homo sapiens
tcagaaaagggtgtatctgtttttgcattctgcttggtgggagaaagaggaccaatttttgaacatgaaaataagtagataagaatctgtgccctgggctcaccatttctactgggtgttgacagttgcctgaagcacaactttgtctctctgacccagtgttttgccactctcctccacctgaagaagatttttttttttctattgcttggctcttgggcaggttgaggagagaagagaggagatgaaggatgtgtaggttgctcctgctgtaaagatcygccctattttgcctggcccctgtcctatttctagtttctgctaccttcagacatgaggttactggtgcttctcctgtcttttgtagtttcgactctcttaagtgcatttgggctgtggt

SEQ ID NO: 1488 - DNA, 401 bp, Homo sapiens
  misc_feature (1)...(401): n = A,T,C or G
ngtaggtgaattaaaattctagagtaacaacatgaaaaggatgcagtaagggtccattgcttagtaaagtcatacactgtctcaatttaactgcattaatactggatacaacagtagctggaacaagttgtaaataattatctactacctagctttgaaagagagcacattttacattcttatggaaacttttttttttttaatgatgaaacaaccaattctgtagcatatagaaaatgcataatgtcctgcaaaaataactgtgtagtggaaaattatctctttcagatattcatcacttactgttcactgattttcatgctgagaggttcatgcttagactactcttcaaacaagtttatctgggttgaagttttttgcctcgctccctttggacggga

SEQ ID NO: 1489 - DNA, 403 bp, Homo sapiens
cttcctctccatctcctcactgcttacataggagctcagcttcctcttaaaatccctttcagagaaccctggaaattttcaggatgttttgctcaggaaaaaggctgctcatgttgtactaattctggcttctcatttccgtctcttagttctgcttctgtgggagctgccctccctgaaaatgtgtgtttctgtagtggggtacgatccactgacgttcctgaaggaagagcagttctttaggtgcctgacttggtgaggactttgtcattgatgccttaaagcatcaatgrtcatgatgagagccttacgtagtctttcatgaagtcagctccttcacctgtcaccatcccatttttccctccacaggtgtcaygtagggaggagagaaggaaattccttg

SEQ ID NO: 1490 - DNA, 402 bp, Homo sapiens
ataaaattttcattctcacaatgagaatagtctttcattctctatgaattctccaaataatttagtgattaagaaaacagatctattttcttaatatttcataarccttttggttacatactaaaacaatgtattaatattcttatacggtaatcatatttgagttggttcattagactttattttaacattatgagtaatttttttttttattagaaagtcttttgaattgtagggcataaggaatttttagttgtgactcctaggtctaacatttaaaaaaattcaaaacacactgtcttagcaatgttactagaattaatcaaacgctaaaattttgtaagcctgactccatagaccataaaatattggaaagatcacttgctatgaagtcaataaact

SEQ ID NO: 1491 - DNA, 400 bp, Homo sapiens
tgagcacctgaccgctatttatcaaacattgttctaggggatgtggggaattgtaagagaagctcaagacagtgttcttgtctgggctgatgaaaccttatcctaattcaggctacagtgaatactttatgtgcaytctgagtgttcctatcctttccttgttatatggcaggagtttttgatatagggtacatggacccacaggaggcccttggatagaacacaagtggtaaaattccatcttttaaataattaactactaactgaaatttagccatttcttcaattatatatgttggcacaaaccacagtagtattaagagtgtctctgaccttgtcagcagtagaaaacactgatatttttatataatatcacagttgttgcagatatcttgraaca

SEQ ID NO: 1492 - DNA, 403 bp, Homo sapiens
gaaatgtgtggaatgtaagaaaaacagtgttaagacagaagtttacagttataaatgcttacattaaaaaatgcaaataaataacctgaatgtatacatatgtaactaacctgcacgttgtgcacatgtatcctaaaacttaaggtataattaaaaaaaagaaaaataaataaatattaaaattcaaaaaaaaaaaaaaaaaagagaaaaaggaaaatagagagggaaaaagctaagatggctgactagatgcagccaggaaacatctatcccacaaagagaactcaaaatattgagtaaatcatcagacttcatacagatcttttgagagaaaacacttaaaatcaataaacacagagacactgaggttgaagagggaggaagctgggaagcctgcacagag

SEQ ID NO: 1493 - DNA, 404 bp, Homo sapiens
  misc_feature (1)...(404): n = A,T,C or G
nntttcaaaaatctaaaaatggaattaccatatgatccaacaakcccactaccaaatatttatccaaaggaaaagaaatcagtatgtcaaagacatacctgcacttggacgtttattgcagcactattcataacagcaaaggtatggggtcaacctaaatgtccatcattgaatggatggataaagaaaatttggtatgtacacacacacacacacacacacacacacacacacacacatacacagtggaatactatctagccacagaaaagaatgaaattatgtcatttgcagcaacatggatgaattaataaagtgaaaagacaaaaaaggaaagaaaaacctatcctaaaatttatatggaatcttataggatctgaataatcaaaataatcttgaaaagg

SEQ ID NO: 1494 - DNA, 401 bp, Homo sapiens
  misc_feature (1)...(401): n = A,T,C or G
ngctgccatgtaagacatgacttgactcctcctttggtttccggcatgattgtgaggccttctcagccatgtggaactatgaatccactaaacctctttttctttataaattacccagtcttgggtatgcctttattagcagcgtgaaaatggaataatacaggtggtaaatttcatgttatgtgcattttaccacaattaaaaataataaaaagatgatcatgggcttctagttcaattattccatttcttctccaaattataatcttaccaaaggaaaaaaaaacaaatgagatttaaactgccaagaacaagggcaaggtgagggtctttgggccttataattgatgaatatcttgccaaagtaacattacttagagtttcaaattgctgaacgatga

SEQ ID NO: 1495 - DNA, 402 bp, Homo sapiens
  misc_feature (1)...(402): n = A,T,C or G
ngagatacataattttttttcttagatttaataatgtggattataataccaatrggttatctaatattggaccaactttgcattctgaaagaaattccacttagttgtgttgtattgatttcacaatgtataagattctgtttgctaatgttttagttggtatttttacatcaatatccataaacatactgctctgtaggtttttttttgtatttttaaaaatttagatttaggtattagtgtagtacttgcttcttaaaaattgggaactttttattcatctttaatgttctgcagcactctataaaacattggaaatatcaaatctttgatgattcggtagaatttttttccaaagttatctgggcaaggtgctttttkgttgatgtttttcttaataac

SEQ ID NO: 1496 - DNA, 402 bp, Homo sapiens
  misc_feature (1)...(402): n = A,T,C or G
natggctccattttttcactgctccctatattcatgtcttttgccatcttactttgcagtgttcctccattctgacacagtacatggccacgtaacttgctttttcctaggaggaagtagaagtggcagtgtgctaatacaaacctaagcctcagaatgtcttatatatttgctttttgttgttggctttagtttttttttggctgtttcatttctgcacttcagcctgctgggaactgggaaatagaaggaatatagccaagccatcaagatcatccaagctgaggccagcatcaaggagctggaagcctataaatgcagatatatgagcgagctctgctaacatcagtagtgctcccaactgactactccagacgtcgttagaacttactgctgtgtact

SEQ ID NO: 1497 - DNA, 402 bp, Homo sapiens
tgctaagttcagactgttcagtcaattgattatactgagagagattatgcagtaaagttatttagctgackggtaaagagtctctttggggatggtgtgcccagcgcacaaggttaaggagttggaagatttcttctgtgaataaaatcaatgtttggggctcagtctatcgggaatgacttattactagtactaaaatttgtgtgtgtgagatttaataagtctttaatatggtcttcatttgttgcttcatttattcaaacatttattaattgcctctgtcttacacatagaaaaaaacctaatgctaaggctgttgtcactgcgctcaaggagaagaggaaaataacagtaatttatacctgctagtatgtgctaggaactattttaagtgtgttatgc

SEQ ID NO: 1498 - DNA, 401 bp, Homo sapiens
atgacatgggaaggagggcttgctcaataaacattgcctgttatagtgtgctggcattaccttaaaatccttaataagctgtaagttttggatgagagtcagaagtgttgggttggtgaagcattttgctacagattgcaggcttttctccggtgtcacaaggcattgaaaacgcttgttcggagacagcccagaagggaaaaaaaaaaaaaattctggaaagcctggcattttgtgctatgttgtgagtaagacatttatagttattgagccaaaatttccactgtaatagaaaaagcagttgcttttaaacttctggtccaatttagtaattatgggtgagttaaaatgtaggccatttgaattggatttggaggatcaagtaagattctgtcctacag

SEQ ID NO: 1499 - DNA, 401 bp, Homo sapiens
gcacaaattacaactcctacacagctctaccccctccacttttgagtttcaagacttttgccaaagttttctggtctttgttcacttctattattaacatctcttgtgtgaaggggaattttgaatgaatgggatgaaatcatctaaaccagcttcggtcctaaatatagtgtctggcatcaggtctgggaaaaaaaaaaattggtcaaagagatagcctgaggttatttttaggaagttggatgtttagggaaattratactatgaaagttctggcctctatctctgaagatattccattgagagatacatgcatgcattcaacatctcgtttttttccattcctgcccttygggtgttccgcgtcattcactatcttgtcattacagcattaagcagaa

SEQ ID NO: 1500 - DNA, 401 bp, Homo sapiens
gcagtgcttggctggagtaagctccatgtaaatgttagtccttgaatgaaagtagagctctggtagagatattccataaagacaaccttaaacatttttgaaccttttatgcctccaaaatatacacttccaaactcttctatcactgaccatattacttataccctaacaaggaagttattaagaatcataccagagtaacaggaataaatcatgccagtcaggaaaaggggtacattggttattctatttataacattacttgagtatttataacaacaagtaaacaaaacgttttttagaaaaagaagagattactgtgttgtacaaatattactagatgggtaatttctctcctttttttccaatgtattccagaacccccatggatatcaaaatta

SEQ ID NO: 1501 - DNA, 401 bp, Homo sapiens
atagcaccacccttatgcttactaatcccttcatctttaagacacctggataatgagctatctgcatggttggaaatagtctgggtttgttctaaattttacattagataacaggtcagcaacaaaataatgggagggggaaattagaaaacattaagtcttatttcatgtcatgtgatacagtatatatgtattttttttaataaaagaaagtgacatatattgtagttcaattggatatttacatttcatgtagaccataatggtagcggtaattatagaaatcttagcaactttcaaaggaaatttttcccagcaagatgactgacaaaatttttgaaagtaatagagagaaactgaggcataaaatttacctgaaagcagtcctgtttaaattggac

SEQ ID NO: 1502 - DNA, 401 bp, Homo sapiens
tccagacgaggtcagataaagtggattatatgggtaaacattgtggaaagtaagcttttcgaaatattgtaactggtgaaaagttgtccatcatagttaatgggctacctgagcaaatacctttcctgagctttttcttgaattcatagaaacttgggtctgaaagaaaacttacaagtcatcacttttttttttttttttgagacaaagtctcagtctgttgccaggctggagtgcagtggtgcgatctgggctcattgcaacctccgcctcctgggttcaagcgatttttctgcctcagccttctgagtacctgggactacaggtgcacgccaccatgcccagctaatttttttgtatttttagtagagatggggtttcaccacgttggccaggatggt

SEQ ID NO: 1503 - DNA, 401 bp, Homo sapiens
cacggtgaaacctgtctctactaaaaatacaaaaaattagccaggcatagtggcgggtgcctgtagtcccagctactcaggtggctgaggcaggagaatggcgtgaacccgggaggcagagcttgcagtgagctgagatcacgccactgcactccagcctaggcgacagagcgagacttggtctcaaaaaaaaaaaaaaaagaagtaattggatgaggtgatttatgtaattcctacaacctctcagtgctaacaaagcaacattcaatgacatttacaatgatcatggtggcaagttgggagagagaaagggcatttctgaagtaataataaaatgagtaaaataagatggtagtgccgtgtgttgatattgtgaactttacatttttactttctctcat

SEQ ID NO: 1504 - DNA, 401 bp, Homo sapiens
atcctaatttctgaaattattcctgaaaattcaagtccattgtttgtctcccaccctatcctttggttctgtcacctcagaactaacaccttgacaaagtgtttcttttttgtccttctaccctccccgcaaaagtttattttttaataaatcgtttctggcaccaacccaaaccacaattacttaaaaagaaaaaaaaaatagcccaggattccatttacttataaacttgctttctgaactttatttttaatttcagcatttttttttttttttttgagatggggtctcgctctgtcgccaggctggagtgcactggcgtgatctcggctcactgcaacctctgtctccctggttcaagcgattctcctgccttagcctcccaagtagctgggattaca

SEQ ID NO: 1505 - DNA, 401 bp, Homo sapiens
agtggaagagtttcaaggcaatcttccactcaggactccttatgccttgcatgcacacaaagcagcgttgctcaaaacataggaaacaactatgaggaataaaaaggaaaagcttgttccttaaagaacgagaaggaggccagcagtctttttcataccttcttgtttatagaaagcagatttttttttttttttttttttagtaaaagcatatttggagcaggaaagaaatatgacctagactgtgttgttttcttttattgtatctacaaatagtttagctgaagtgagcttttcagttattgattttaaatcataagtttaattcgtcatcaaggcaacaacaaatgtgatgtttggggcagatgcaaagttgaagtatgtctaaagaaatagcacgc

SEQ ID NO: 1506 - DNA, 401 bp, Homo sapiens
tgtttgatctttgtaaaactacatatgactctcaagttgcaagtgatactgtggttcagcttatcaaatactggaatttggcttctgtcactgactctgccactggctttgtggtcctgaacgcagccctgatgtcagatgtgttggtaatcttggggaactttaagcaagccagctttttttttttttttttttttttttaggactagatggaggtaagggaaagtgtgagacaataaaactggcaaccagaaacagaagaagaaaggaagagagaaaggaatctacggagtgtggaagttttaggagtaaatttctatataagttgcaaaattttagtaattctttagttcttatttcatttattcacttattttttttttcttttkagacagagcctc

SEQ ID NO: 1507 - DNA, 401 bp, Homo sapiens
gcattttctgtctgatttaattaagaccactacctgctgacaaggctttgagaaagaaacaaaaataaggaatgcacaaataaaatgtaatgcaggtcaggcatggtggctgatgcctaagtgggaggcttaggcaggtaatcacttgaggccagaagtttgagaccaggctgggcagcacaccaagaccatctctctacaaaaaaaaaaaaaaaaatacaaattagccatgtgtggtgatggatgtctgttgtccagctagtcaggaggctgaggtgggagaatcccttgaggccagttcaaggttacaatgagctatgatcatgccactgcactccagcctgaacaacagaatgagaccctgtctcattcaattctttaaaaatctaatgcaaaaacat

SEQ ID NO: 1508 - DNA, 402 bp, Homo sapiens
tcctttggatattagcattggaaagagtgttttttgccagccttgatggtgcacccctgcagtcccagatacttgggaggctgaggtgggaggatcacttgatcccaggggttcgaggctgcagtgagctgtgattgcaccactgcattccatcctgggcaacaaagtgagacactgtcaatcaagaaagagaaaaagaaagagagagagagagagagaattctttttccttttctttcaaggaaaaatcagaaaatgagtggttgatcttagttcaattaaagaaaacaaaacaaacctgctgggtgcctcctctgctctaaatactaagcaagaaataaagtgaataagcccctgccagtcatgtaactaaactctgaatgagggaagtagctaaaatgt

SEQ ID NO: 1509 - DNA, 400 bp, Homo sapiens
atcatagtaaagtagtaaattcatagggaatgaattaatctcctttttgttttgttttctctgaaaaagagggtgtgattacagcatatattgattgggtactgattatgggacattttcattgtatttgttgttgttgcagtagactaaatgtcgagcccgtgaatctcttgtgttggcattgtcagaaaaaagttgtatttttttttaaactggtctaaaaggaaaaaaattgaacatatatctttatattttttttgctctcttctcaaccatgtttagtgttttgtttatattcaaaggattttattttcacacttacaattctttacttgtctgtcattcaaatctttgttaccaaaacagtttgctctttttcatcattcactaagcattcctt

SEQ ID NO: 1510 - DNA, 401 bp, Homo sapiens
cttcacccactactctaaatctgatgaaacagagcagtaagaatttcttaggatatagcttaatttatttttttttaaaaagctcaatctaaaaacaagcttaatttaaaacagagacaaacaaatatgcctaactttgagttttgacaaaaaatgcaaaagtaattcaatggaggaaagatgagctttaaaaaaaaaaaagtgatactggagcaattggatatccaaaggcaaaaaaaaaaagtgcctaaattcatttctcacatcttatacagaaattaactcaaaattgattacagacttaaacataaaatgttaagcaataaaactttaggaaacaaacaggagaaaatgatgaggacctaaagctakgtgaagaacttctagacttgatactaaaa

SEQ ID NO: 1511 - DNA, 402 bp, Homo sapiens
aaaatgtactgcacaattggcgtgcaatagagtagtcaaagaaccaatgaaatgyaaaaagttatctatatggagatctcaaaatgaattaacaaattaaatcctttgacattgtatgagatcccattagggttcattgttacagttttctttaatgtttctaaaatagaaatgttgtcctgggcagagcagtgtaatgtgtacttgctttggcatcaaatgccacattttttttttttttgagacggcgtcttgctctgtcacctaggctggagtgagtgtgcagtggtgcaatcgtagctcactgtagcctcgaactcctgggcttaagcaatcctcccacctcagcmtcctgagtagctgggactacaggtcccagstgcccagctatttttaaaattt

SEQ ID NO: 1512 - DNA, 402 bp, Homo sapiens
aaaaccccgtctctactaaaaatacaaaaattagccaggcgtggtgatgagtgcctgtaatcccagctactagggaggctgaggcaggagaatcgctagaacccgggaggcagaggttgcagtgagccgagatcgtgccactgcactccagtctgggagacagagtgagactccatctcaaaaaacaacaacaacaaaaaaagtgtacatactgcatgatacaaaattctaagaaaagaaaactaatctatataaaaatttttctctgttattctctactgagaggggatgaggaggattaccaaggggcaaggaggaccttttggaggtgatagatgtgtttattactgggattgtgttgatggcttaccaggtatctatgtaagtcacaactcatcatat

SEQ ID NO: 1513 - DNA, 401 bp, Homo sapiens
tactgtaaatatgtgcaggctgggcgtggtggctcatgcctgtaataccagyactctggaaggccgaggtgggagaattaaggccaggagtttgagacatagcaagatcytgtctctagtaaataaataaataaataaataaataaataaataaataaatgcacttttttgtatattgagttatatctcaatgaagctgcttttttttaaaaaaaaaaaaaacatataacataaaagagattaacagaagagattcaaaagtctagaacaccaaatattaaaggtagcttttcaaatcagtgagaaaataatgatattacagaaaatggcaaatcatctagaattaaatttctacttcatactatcagcaatataaattgcagactaatctaaattaacaa

SEQ ID NO: 1514 - DNA, 401 bp, Homo sapiens
aggggtaattagacatcgactgtgtagtcaacattatgatcaggctatataaaatcatgaaacatcatcctaaactttaaagaactttgagtttagctgggaaaatatgctcacaggaaataattatgtaggaaaagaaggcatcaaaagggcttaaagcaaccaatcacacagagtttccttgttgggaccccccccccacccgccgggccccaccccgttgatatcctaaatgttctcttgacatcttggatttaccatagagcctagtactgtctgtaaggtcctgggcctgttctaattagtgctgagtatctgttgatctgctacgtgcaaatgggaagataaaactaaatgttagattagggtcaatctttaaaactctttcctagattgtgatg

SEQ ID NO: 1515 - DNA, 402 bp, Homo sapiens
aagtttttttcatcatgtcctgcttttacaaaccaagatctaatttgacatgattacgtaattgtgtggccatttgtgcccttccttctcctcctcctttctctaaagtagaaagcctctctttcctagagcctatgtaaaatgtgttaattcgcttaatagcaataataattttcttatgacaatttatctattcactaaagtgttattaaggacctattagttggaagcctctgtgccagctgttgggaatagaaaaatttataagacactgtctttggagctttcaatctagtgggggattcaaacaattaaagagatacttttaaaagacagtgtaataagtactctggaagatgtggcagactgccagttgccttccccagcataacattttcccaa

SEQ ID NO: 1516 - DNA, 402 bp, Homo sapiens
tcctggactatgaggtaaccttgggagtactagggaattgggatgctagtaactttctagaagcaccaactcagccccagaatgcctcctgctgacttcttttacgtgggagagtaagcatttgtgcatttaagccactatagttggatatttgaccattgcagacaaaaataagatcaaccgatagaatgccatttatgaaaaaaaaaaaaaaaaaaaaaaaccatgggagtggttctcctctctgttatgatagggagaggtcagagatgctgtccctgaagaagtgacattcacactgagacttaagggagaaatgagtgagcaaggtataggaaagtatttaaggaatatcatctgaagctctgaattagaagctatctacaagatactaaaagaaga

SEQ ID NO: 1517 - DNA, 402 bp, Homo sapiens
gaaattatgaggggttgtggracttttctatattttgatcttgaaaattatataactatatacttgtgttaatcttgtagaagtgaacactaaaaagggtgaattttattataaacaattttttaagagaacaaaaaatgtactataatcccaccagccaataacacactattaacactttggcgtacttctgactagtctttttttttttttttttttttttttgctggtgtttcaaaatgtcattatgatcatataatacacaaatatacatatatgtgtgcatatagatatctacagatgactaagatagatgattgatagatgatagatcagtgaatagataaccaaactcaaaacaaaatagttaattcatgcaacttgcacaaaaggtacaagaaa

SEQ ID NO: 1518 - DNA, 403 bp, Homo sapiens
gaaaaggacttttwtgtttgtttgtttttgagacggagtcttgctctgtcgcccaggctggactgcagtggtgcgttctcggctcactgcaagctccgtctccctggttcaagcgattctcctgcctcagcctcccgagtagctgggattacaggcgccagccacaacgcccacgcccagctaattttttttttttttttttttgtagtagagacggggtttcaccatgttggccagattggtcttgatctcctgacttcatgtgatccgcccgcctcggcctcccgaagtgctgggattacaggcgtgagccactgagcccggccgaaaaggactcttttttttttttttttacacagagtctcgctctgttgcccaggctggagtgcagtggcgccatctc

SEQ ID NO: 1519 - DNA, 401 bp, Homo sapiens
atctttttgagtgagtgttgccactttgacccaggcaaatgagaaataaaacaacaataccaaccagcagtttcaagtatccttctgctgcataataactcagcagtaggctttgctaatggtgtttatgagctgccaggctagaattggcccttaagcagggaggcatttgcccagtgggcttcttccatgtggggggggcctttttgcagcctgggggcccttttaggtgattctcagccggagcggtctcttcaggccaaagacttttgcaatgagctaactatgttcaattattgctttcagatccaccctacattcaaatgttttgggacaccaatgtaataccataaaaatgactgtgtaggacacgcctatgctaatgtcatgactggtttgtt

SEQ ID NO: 1520 - DNA, 401 bp, Homo sapiens
gaccatcctggctaacatggtgaaaacccgtctctactaaaaatacaaaaattagccrggcgtggtgtcaggcgcctgcagtcccagctactagggaggctgaggcagaagaatggcatgaacccaggaggcggagcttgcagtgagccaagatcgcaccactgcactccagcctgggcgacagagcaagactccgtatcaaaaaaaaaaaaaagaaagtttgggcaaaacctagagtttcagggaaagtcatttgaggtttggtttaggcaggaaatagaacaaaaccagtgtactaaggagaatacagtggaaataagagggaaaggaatgaagaaactggtaggctactaaaatgcccaggtacaaactactgaacatccacctttatgctgtcagtg

SEQ ID NO: 1521 - DNA, 401 bp, Homo sapiens
tcaggcgtagtgaacatacaccacgcaacctcccattcagagaattcttgtgcaaagaaggattccaaagggtttcagaaatactaaacttcttgaaattgaaattgaaattgaaatccttcttggcttctctacctgttacttcctctgcagtgctcagtatagtgtctgctctccctcctttctttttcttttttttttgagacagattttcactcttgttgcctaggctggagtgtaatggygcaatcttggctcaccgcaacctctgcctcttgggttcaagcgatactcctgcctcagcctcccaaggagctgggattatagtaccacgcccagctaattttgtcttttcagtagagatggggtttctccatgttggtcaggctggtctccaactc

SEQ ID NO: 1522 - DNA, 404 bp, Homo sapiens
aggacacaggaatattaatctggagaagcctttgataatagaatatagtcaaagttgacattgtgctagaatatttgaattttttattttccagaaattattttcactctttgctacatttactgtttgacctcaaaagaatgtaaaagcaagtttttaaatacaccattatttcctcaagaggctacagaattgctggaattttttttttttttttttggaatggagtcttgctctgccacccaggctggagtgcagtggcaygaccttggcacactgcaacctccacctcctgggttcaagcagttctcttacctcagcctcctgagtagctgagattacaggtgtgtgctcccatgcctggctaatttttgtatttttagtagaggtggggtttcgccatg

SEQ ID NO: 1523 - DNA, 402 bp, Homo sapiens
tggaattgagttatatgggagtcaattattcggtcacagcactggattaggaggttgagttcttgatagatttactttcagctgacctgtgtgacatttggtatttggttttgcaactttgttttcagttttttccatgcaccaatactcctagaattttgcttttgcctcttttcttccctttcatcttttttttttttttctgtagaaagcatacatccatatagaagacctctctcaatacattccagatctgagttgcagtgcagcacttagcttagcttgtgaaacactccraagacttgattaatatcatcctatggagagatgtccttaagtaacttagaatggatcctttatttttccagtaaataaactctaaaatatgaggatttccaaggt

SEQ ID NO: 1524 - DNA, 401 bp, Homo sapiens
caagatcacagaagagccattaacattttaaaaacagagagatcttgtagataacctaatcaaaatattttactttactcatggggaaactaagatccagaattgtgaaatgactgggtcttaaatacatgcagctagtaagaaacacgggctggtctaaaaaacaggaatgccacttcatttagggctttttttttttttcaatatcccatgctgcttcttataaattagataattctttaatggtggaagactttattttttctgttgttctatattctttattgagtgcctgctcaatagagaagagtttacctctaaaaggagaacaaacaaaagaataataaacmagaaatcatatactatcttagcaggcrtatggggaaaataagtgtgaggag

SEQ ID NO: 1525 - DNA, 401 bp, Homo sapiens
atattctgtagaatggatattattgtagccaaaaaattaatttacataggtacacagatgatgacatggtaagctttctttaattagaaaatgtttctttcatttaatatctttcatcttaagatcaaaaacaatcttgcaatattgaccttacagcactgttcttctgttatcctcattaaaataatatcaataacaataatagtaataatggccattgttgttgttatgttctctgaggcatttagctcagagaatgttgagaaaaaaacctgacaaagtacttaaatattcttgatgccatctctctcactcttcataggttgtggatataaagaactctgtttttttcattttttataagccacaaacaatgaagtaatcatttctttgttaaaaca

SEQ ID NO: 1526 - DNA, 402 bp, Homo sapiens
tcagcttagggagattttgggctgagacgatggggttttctaaatatacaatcatgtcatctgcaarcagggacaatttgacttcctcatttcctaattgaataccctttatttctttctcctgcctgattgtctctgaagatagaccaatagcaggctctgaaattgaggtaataattaatagcttacctaccaaaaawagtccaggaccagatggattcacagccaaattctaccagaggtacaaggaggagctggtaccattccttctgaaactcttccaatcaatagaaaaagagggaatcctccctaactcatttcatgaggccagtgtcatcctgataccaaagactggcagagacacaacaaaaaaagagaattttagaccaatatccctgatga

SEQ ID NO: 1527 - DNA, 401 bp, Homo sapiens
tctattgaataggagtggtgagagttggcaaccttggcttgttccagttcttaaagagaatgctccccgtttttgcctgttcactacaatgttggctgtgggtttgtcatagatgtctcttattgttttgatatatgttccttcagtgcctagttttttgagaacttttaccaagaagggatgttggactatattgaaagcttttttgcatctattgagatgataatattgttkttgttcttaattctgtatatgtggtgaatcacatttgttgatttgcatatgttgaaccaaatttgtawcccaagamttaagcctacttggtcacggtgaatgaactttttgatgtgctgctggattcaatttgttagtattttgttgaggatttttgtatctatgtt

SEQ ID NO: 1528 - DNA, 401 bp, Homo sapiens
gttagtaacactgattagaaatgcagcagttttattcaggccttggttttattgaccatttttggttggctcttatctctgtgactgatcatgtatgcgtatttcaaatggataaataaactaaaaagtgtttaatactccaaaatgattagaagtgtattgttaaataccaaaaagaaaataattctggggtgtttcaggcatgttattctgttarcrtagttcacgttgagtgtttgtattcatttgttgtttgtttgtttgtaagtaacaggttttgactaaaattccacggactgtggaacarcacacactggggtctatcggagggtggaaagtgggtggagggagtgggtcaggaaaaataactaatgtatactaggcttaatacctgggtgata

SEQ ID NO: 1529 - DNA, 401 bp, Homo sapiens
ggagagagatagggaaggggaaatgctgtcaaaggatccaaagtttcagttagacagaaaaaataaacttcagtgatctattgcacagcatggtgaccacagttaaaaataatgtatggtacatctccaaattgcttaaaaaaaaaaaaaaggtttcaaatgttgtcaccacagaaaaacaaaaacaaaaacaaaaaaaaacaaaaaaaacgaggcaaggtgatggagwtgttaattagcttgatttaaccttcctacaatgtatatgtgttagtccgtttttgcgttgctgtaaagaagtatctgaggctaggtaatttgtaaagaaaagtggcttattttggctcatggttctgtagactataaaggtagcgtggtgctagcatctgcttttggtgagg

SEQ ID NO: 1530 - DNA, 401 bp, Homo sapiens
tcctcccatcaaagcttgggatctctgggaacagggaaacatatcaagatattagaagaygtcaatgttatatatgcagaaatggtgaaaaatcaatgaatttagtaagttaaatttgtttgggtagcattttaaaaatatttaagtactttgacatatgttaccccctaatacacagagggtgctcagacagcatttgcttacaggagtgaaccctggccaaagctgttttaaccaagggacagtggargcccagagaggttcgttggtttgcttaaaatcacacatccatgggtaagcaaggtgatggataatcagctcaattgagtcagtttacattgtatacacataacaaagcatcatgttgtgccctgtaaatgtatagaattatgatttgtcag

SEQ ID NO: 1531 - DNA, 401 bp, Homo sapiens
gattagaaaatcattatatccactttaagtgaaaagaaaaagtcttcatttttgtgttacttttccaaacctccttttggcactgaattgtactttatgggggtgtcttgtcatttttttctaaattaactacacctctgcttgcctggaaactagagccattctgacttctattccgatatgtgtktttcatctcctactttttttttttttgagacagtcttgctctgtcgcccaggctggagtgcagtggcacaatctcggctcactgcaacctccacctcccgggttccagcgattctcctgcctcagcctcccaagtagctgggactacaggcacgtgccaccacgccccactaatttttgtattttttaatagagatggggtttcaccatattgg

SEQ ID NO: 1532 - DNA, 401 bp, Homo sapiens
  misc_feature (1)...(401): n = A,T,C or G
atttttgtgtataatgataaaaaacaataaaagaaataaagctatttgatttggatgtacagagaaaaatccaagctatgggaagtacattgtgacccccaggtgtatacatatgtacataagctggggttaagctattgccttaattttagccccacccatgtacactctgtgacgctgcctgggattctacaaatcacrtttatcttttgccactaagctccctgttaggatctgccaatcagaggacgctaggggcggactggaaggctgagtggggaagaaggaagacacttcctgtttgcttcctgttctgtttaacgacaccctaangattacttttcatttcagcagttatagtttgtttcagtagcaacagttatttccagttttagttttga

SEQ ID NO: 1533 - DNA, 401 bp, Homo sapiens
  misc_feature (1)...(401): n = A,T,C or G
tatgtgtttattagttaaaataaataattgactttccttgtactgtctttttctggttttgatgtcagtgttgtttagctttgaggaatgggctaggaaatgtttcatatattttgaaataatttgtataaattggaattatttgtttcttaaaggtttatggaacatctaaagaacaaattcatctggctctcatacagkttttaggatactactttgattgacatttcagtttcttttagatctatatcttctatttttcttgaggctattttgataattatttcttaagatattatcaattttcatctagataanaaaatatatcattttatgtatttttaaattcatcgatatttccacttttcattgacaacattattaagttttattgtgtctct

SEQ ID NO: 1534 - DNA, 400 bp, Homo sapiens
tcactacagccttgacctcctgggctcaagccatcttcccaccttccaagtagttgggattagagtcatgagccaccatgcttggctccagttttcttatttgtttgccaagtggattgtcttcttttctgttattcaaacaaataaatatgcaaaacagcaaaaaaagttttgcagacacggtggaaatatccaaggagttttttaaagtatggggttcaatttgaattttactaccttctgaatataccttaattaatattgaaattgatcaatggattggagacatttgttaatgatcacaaaataattttgctgattaggatcaaacacagagtctccatgtaatgatttggaagggtgtttaatgaaagctgcaatattgcctacattgttttca

SEQ ID NO: 1535 - DNA, 400 bp, Homo sapiens
aaggagtttttttaaagtatggggttcaatttgaattttactaccttctgaatataccttaattaatattgaaattgatcaatggattggagacatttgttaatgatcacaaaataattttgctgattaggatcaaacacagagtctccatgtaatgatttggaagggtgtttaatgaaagctgcaatattgcctacattttttcatggactttgctggaagcatctttgaaacttaatggcaacttattattatattcaatggtctaataagacaaattcagaaaaaaattttgggctgatcccctgaagtttcaacatttaaatagtctaggaagtattggtgggtgtgtgattttattcccagatccttaataggctgttaagtaggtggctccaca

SEQ ID NO: 1536 - DNA, 400 bp, Homo sapiens
ccacaaaccagttacaaataaacaaatttggcctcagttggaaacctggctacacagcaatgcctccattgactagagtcagtcagttgcatgtttctattttgcaaaatcaatccaacaatcatttactgaaggctcatagagtattgctctgggggatattgaaatgaatatagataaaaagcaagaatgtaatcttaatgtcttctgtttagaatagcttctacttcacaaggcctttttgttttgtcattcattttcaaattaattaaaatacagctcattattttccaggcacaaatatttgctcactatatttaaacatataaatatttaaacacataaatgtccactgctaattgccaggcaattagcagtggacatttgactgcaaatggag

SEQ ID NO: 1537 - DNA, 400 bp, Homo sapiens
taagctacttcactatgttttagatgctcacactgtatctttcttcacgacttcataataaagattaagcgttgtgttttggatagtccacgttgtgctgtaagtgtgctactaaattccataccagatactgcctctgagaagcttcagaagaagcaatgaattataaagaatgctaatgcgtagtaaccaggggttacwggtgggaacatcacaatcactacctaggacagctgaaattcctagaagcagggaattgaaccagggaccaaacaaggtccctatcagctctttagctctggactgaattgagaaagtattattgtttttaactggttcccatttggccttattaagagtttaattgtgcttttactctaaccttttatcctcttgacat

SEQ ID NO: 1538 - DNA, 401 bp, Homo sapiens
atagtcatggatcctgcacctgctctaagacaggctgttaagtgaggcttcctttcggagactgcaaattcaggactccaggcccctcagaatggttgtttcatgatttatagctggaggtgtgtacttctgtgtgctgttggtcaatgatgataaagtaggtatcagtgcctctgtgaattttctgttgccctttcatarccaccatttaggagcatttaatcaggaataaagtgctaggggtgggaaaaccatttcaggttgccattgcactgtggaggcaattgtggacttttcccccccatattttctaaactactaaaaatagtgtttcacatttacctgcataattttatgtctgctctttccctgcttgagcagataacatgatgacagcttct

SEQ ID NO: 1539 - DNA, 401 bp, Homo sapiens
gtgaggcttcctttcggagactgcaaattcaggactccaggcccctcagaatggttgtttcatgatttatagctggaggtgtgtacttctgtgtgctgttggtcaatgatgataaagtaggtatcagtgcctctgtgaattttctgttgccctttcataaccaccatttaggagcatttaatcaggaataaagtgctaggrgtgggaaaaccatttcaggttgccattgcactgtggaggcaattgtggacttttcccccccatattttctaaactactaaaaatagtgtttcacatttacctgcataattttatgtctgctctttccctgcttgagcagataacatgatgacagcttctctgacccctaattttccttttattttcaactttgaccatgg

SEQ ID NO: 1540 - DNA, 401 bp, Homo sapiens
ttctgaacagcatttaatcatactgaacaattattcataccttttcttaagcatatgttaatcatattagaaatgccattcccttctcgtgcaaaagggcaaaatcagcaacatccttccaatgtgggtgggtaaatgaaggctctgatacaagaattgaaatgaaatatgtgtgcaaacagttcttagtactgagctgtwtaaagaaggcctacctttgcacagaaaatgtctataagaattactcattaatgccacttaatagaggaagagtaggagataacgtgggaacagggtctttttaaaaaataccactttaaagaagaggcttatgcttcatcatagacaaaatgctttgtatagtactaacaggggcatatctattcctttaatgacactct

SEQ ID NO: 1541 - DNA, 401 bp, Homo sapiens
tcgtctctgctaacaagtttgcaatctagttggagagatgggagtaaaactcctgaaaaacttgggctcaataagataacatgatcaagagtgaggagacatgatatagactgcaaatgcagggaaagtgcactttgtggagtggtcactccagtgtttagtatgtcagaaaggaggcttcatggggcagacggatctcamaggatgcctaagttcagcagtggattgtttgcagaaatggcctaattcttcccctgcttgtatctctgctctttggcattgcaacttttcaggtccttatgtgaagaggtagagtctactcctctgcccctggccttgtaatggtggcaatgttgacgtgctaattctgattctagacctcaagagacctcgcacatctc

SEQ ID NO: 1542 - DNA, 401 bp, Homo sapiens
tggagagatgggagtaaaactcctgaaaaacttgggctcaataagataacatgatcaagagtgaggagacatgatatagactgcaaatgcagggaaagtgcactttgtggagtggtcactccagtgtttagtatgtcagaaaggaggcttcatggggcagacggatctcaaaggatgcctaagttcagcagtggattgttygcagaaatggcctaattcttcccctgcttgtatctctgctctttggcattgcaacttttcaggtccttatgtgaagaggtagagtctactcctctgcccctggccttgtaatggtggcaatgttgacgtgctaattctgattctagacctcaagagacctcgcacatctccggccactctattgaaacacaaccagctgc

SEQ ID NO: 1543 - DNA, 401 bp, Homo sapiens
caggttaagtctgctggaggaagagaccacattctttatgagatgagatgtttcagcagaagccatgggagactagatagcccccagcagagccatcaatgaggtcaacagaagaactccaccctagctgaacccagtccaaattgccaacttgcagaatcttgggctaaatgaaccaacaggtcaccaaatgttgaagtrgtttgtcatatagtgacagataactgatacaaatctggaaggtagagaggaagaaagtgttctaggccagagttgtacctcccaaaaagtcgagtcagaaatatgggaggccaggctaaagaaaagtaaagaaattagtaggattggatgtttgaaccactttctttcagtaaatcgctagaagcacccatgcagggttc

SEQ ID NO: 1544 - DNA, 401 bp, Homo sapiens
tcagaaatatgggaggccaggctaaagaaaagtaaagaaattagtaggattggatgtttgaaccactttctttcagtaaatcgctagaagcacccatgcagggttcaagtgaacgtatactggaggccagacctgcccaactatgctgctaaatggtgatcttctcctgaagcgctccatcagggtatgagtaacagggawctccccttgccaagacacacagggagtgtgatgaccctgtccctccaaactgcactttgagagaatggaaccttgttttgtagccaactatattatgccaagaacaaaaagatctttgtagcttatcatctgtttttatgttttatataaaaatctaaagcttctatgacatactttcaagaaactgctagaggcaacac

SEQ ID NO: 1545 - DNA, 401 bp, Homo sapiens
gagtaacagggaactccccttgccaagacacacagggagtgtgatgaccctgtccctccaaactgcactttgagagaatggaaccttgttttgtagccaactatattatgccaagaacaaaaagatctttgtagcttatcatctgtttttatgttttatataaaaatctaaagcttctatgacatactttcaagaaactgytagaggcaacacgtagaatcccagagtaaagatattatgaagttagagtactttaaaattcttcagttctcacagtgtggatctatcgcccattgaataacaactttaactgttttatgaggtcactgaatatatttttcactataaaagaacatgagagaaaatatttaccttgaaatgctaaaaatgtgttccctttc

SEQ ID NO: 1546 - DNA, 401 bp, Homo sapiens
atgttttatataaaaatctaaagcttctatgacatactttcaagaaactgctagaggcaacacgtagaatcccagagtaaagatattatgaagttagagtactttaaaattcttcagttctcacagtgtggatctatcgcccattgaataacaactttaactgttttatgaggtcactgaatatatttttcactataaaakaacatgagagaaaatatttaccttgaaatgctaaaaatgtgttccctttctgtggaatggcatttgttgaaaggaatatcccgggagaggatggattcttgttttagacatagctctttaaatttggcaggacatgtgggggtagggggacagatgggggtggagttgggggagcttggtattcaggtggcacaatacca

SEQ ID NO: 1547 - DNA, 401 bp, Homo sapiens
tataaaaatctaaagcttctatgacatactttcaagaaactgctagaggcaacacgtagaatcccagagtaaagatattatgaagttagagtactttaaaattcttcagttctcacagtgtggatctatcgcccattgaataacaactttaactgttttatgaggtcactgaatatatttttcactataaaagaacatgaragaaaatatttaccttgaaatgctaaaaatgtgttccctttctgtggaatggcatttgttgaaaggaatatcccgggagaggatggattcttgttttagacatagctctttaaatttggcaggacatgtgggggtagggggacagatgggggtggagttgggggagcttggtattcaggtggcacaataccaggtggagg

SEQ ID NO: 1548 - DNA, 401 bp, Homo sapiens
attcttcagttctcacagtgtggatctatcgcccattgaataacaactttaactgttttatgaggtcactgaatatatttttcactataaaagaacatgagagaaaatatttaccttgaaatgctaaaaatgtgttccctttctgtggaatggcatttgttgaaaggaatatcccgggagaggatggattcttgttttagwcatagctctttaaatttggcaggacatgtgggggtagggggacagatgggggtggagttgggggagcttggtattcaggtggcacaataccaggtggaggttaaatacctacaactccttatgcctgggatcttttgttccaatagccatagaagcttctttcatttcactttttatttttattttttgcaaaacccatt

SEQ ID NO: 1549 - DNA, 1006 bp, Homo sapiens
cggtttttttgccttttctattttgccttttttttttttgcccttatacctcttcgcctttctgtggttccatccacttcttccccctcctcctcccataaacaactctcctacccctgcacccccaataaataaataaaaggaggagggcaaggggggaggaggaggagtggtgctgcgaggggaaggaaaagggaggcagcgcgagagagccgggcagagtccgaaccgacagccagaagcccgcackcacctcgcaccatgagatggcgacgcgccccgcgccgctccgggcgtcccggcccccgggcccagcgccccggctccgccgcccgctcgtcgccgccgctgccgctgctgccactactgctgctgctggggaccgcggccctggcgccgggggcggcggccggcaacgaggcggctcccgcgrgggcctcggtgtgctactygtccccgcccagcgtgggatcggtgcaggagctagctcagcgcgccgcggtggtgatcgagggaaaggtgcacccgcagcggcggcagcagggggcactcgacaggaaggcggcggcggcrgcgggcgaggcaggggcgtggggcggcgatcgcgagccgccagccgcgggcccacgggcgctggggccgcccgccgaggagccgctgctcgccgccaaygggrccgtgccctcttggcccaccgccccggtgcccagcgccggcgagcccggggaggaggygccctatctggtgaaggtgcaccaggtgtgggcggtgaaagccgggggcttgaagaaggactcgctgctcaccgtgcgcctggggacctggggccaccccgccttcccctcctgcgggaggctcaaggaggacagcaggtacatcttcttcatggagcccgacgccaacagcaccagccgcgcgccggccgccttccgagcctctttcccccctctggagacgggccggaacctcaagaaggaggtcagccgggtgctgtgcaagcggtgcg

SEQ ID NO: 1550 - DNA, 401 bp, Homo sapiens
ctcttcgcctttctgtggttccatccacttcttccccctcctcctcccataaacaactctcctacccctgcacccccaataaataaataaaaggaggagggcaaggggggaggaggaggagtggtgctgcgaggggaaggaaaagggaggcagcgcgagagagccgggcagagtccgaaccgacagccagaagcccgcackcacctcgcaccatgagatggcgacgcgccccgcgccgctccgggcgtcccggcccccgggcccagcgccccggctccgccgcccgctcgtcgccgccgctgccgctgctgccactactgctgctgctggggaccgcggccctggcgccgggggcggcggccggcaacgaggcggctcccgcgggggcctcggtgtgctac

SEQ ID NO: 1551 - DNA, 401 bp, Homo sapiens
ctgctggggaccgcggccctggcgccgggggcggcggccggcaacgaggcggctcccgcgggggcctcggtgtgctactcgtccccgcccagcgtgggatcggtgcaggagctagctcagcgcgccgcggtggtgatcgagggaaaggtgcacccgcagcggcggcagcagggggcactcgacaggaaggcggcggcggcrgcgggcgaggcaggggcgtggggcggcgatcgcgagccgccagccgcgggcccacgggcgctggggccgcccgccgaggagccgctgctcgccgccaacgggaccgtgccctcttggcccaccgccccggtgcccagcgccggcgagcccggggaggaggcgccctatctggtgaaggtgcaccaggtgtgggcggtgaa

SEQ ID NO: 1552 - DNA, 401 bp, Homo sapiens
tcggtgcaggagctagctcagcgcgccgcggtggtgatcgagggaaaggtgcacccgcagcggcggcagcagggggcactcgacaggaaggcggcggcggcggcgggcgaggcaggggcgtggggcggcgatcgcgagccgccagccgcgggcccacgggcgctggggccgcccgccgaggagccgctgctcgccgccaaygggaccgtgccctcttggcccaccgccccggtgcccagcgccggcgagcccggggaggaggcgccctatctggtgaaggtgcaccaggtgtgggcggtgaaagccgggggcttgaagaaggactcgctgctcaccgtgcgcctggggacctggggccaccccgccttcccctcctgcgggaggctcaaggaggacagcag

SEQ ID NO: 1553 - DNA, 401 bp, Homo sapiens
tgcaggagctagctcagcgcgccgcggtggtgatcgagggaaaggtgcacccgcagcggcggcagcagggggcactcgacaggaaggcggcggcggcggcgggcgaggcaggggcgtggggcggcgatcgcgagccgccagccgcgggcccacgggcgctggggccgcccgccgaggagccgctgctcgccgccaacgggrccgtgccctcttggcccaccgccccggtgcccagcgccggcgagcccggggaggaggcgccctatctggtgaaggtgcaccaggtgtgggcggtgaaagccgggggcttgaagaaggactcgctgctcaccgtgcgcctggggacctggggccaccccgccttcccctcctgcgggaggctcaaggaggacagcaggtac

SEQ ID NO: 1554 - DNA, 401 bp, Homo sapiens
gcggcagcagggggcactcgacaggaaggcggcggcggcggcgggcgaggcaggggcgtggggcggcgatcgcgagccgccagccgcgggcccacgggcgctggggccgcccgccgaggagccgctgctcgccgccaacgggaccgtgccctcttggcccaccgccccggtgcccagcgccggcgagcccggggaggaggygccctatctggtgaaggtgcaccaggtgtgggcggtgaaagccgggggcttgaagaaggactcgctgctcaccgtgcgcctggggacctggggccaccccgccttcccctcctgcgggaggctcaaggaggacagcaggtacatcttcttcatggagcccgacgccaacagcaccagccgcgcgccggccgccttccgag

SEQ ID NO: 1555 - DNA, 401 bp, Homo sapiens
ctggggccaccccgccttcccctcctgcgggaggctcaaggaggacagcaggtacatcttcttcatggagcccgacgccaacagcaccagccgcgcgccggccgccttccgagcctctttcccccctctggagacgggccggaacctcaagaaggaggtcagccgggtgctgtgcaagcggtgcggtaagttcctcgcccytgggggcgcgaacccgcggcgaggagggcgcatcccgggcgcgcgggcagcggggctcgacggccgcccgagcaaggcagaggcgctctgggtcccagttgttggtttcagggtggtgggttctcagcgatcctcagagagggaggtttcgctttctccagcttcccttgtcttaggctttgccactggagaaagcccaa

SEQ ID NO: 1556 - DNA, 401 bp, Homo sapiens
gccttcccctcctgcgggaggctcaaggaggacagcaggtacatcttcttcatggagcccgacgccaacagcaccagccgcgcgccggccgccttccgagcctctttcccccctctggagacgggccggaacctcaagaaggaggtcagccgggtgctgtgcaagcggtgcggtaagttcctcgcccttgggggcgcgaayccgcggcgaggagggcgcatcccgggcgcgcgggcagcggggctcgacggccgcccgagcaaggcagaggcgctctgggtcccagttgttggtttcagggtggtgggttctcagcgatcctcagagagggaggtttcgctttctccagcttcccttgtcttaggctttgccactggagaaagcccaagtttagtcctggg

SEQ ID NO: 1557 - DNA, 401 bp, Homo sapiens
ggagacgggccggaacctcaagaaggaggtcagccgggtgctgtgcaagcggtgcggtaagttcctcgcccttgggggcgcgaacccgcggcgaggagggcgcatcccgggcgcgcgggcagcggggctcgacggccgcccgagcaaggcagaggcgctctgggtcccagttgttggtttcagggtggtgggttctcagcratcctcagagagggaggtttcgctttctccagcttcccttgtcttaggctttgccactggagaaagcccaagtttagtcctgggttggggcctcctgaaactttttaatcctttggggtttggctcaccaagtagatcggaaatgtgccggctgctttcttgtgggtgatatgaacttggctttggttaggagttgctga

SEQ ID NO: 1558 - DNA, 401 bp, Homo sapiens
atttgtggtggttaagtcctgctgttaattaatacctgatgatttggttttaatgacagcaaagatcattgttcacccaccattcccttatctgaacaatgtactttgtatgccagagacctgttaggattgcaccactcagtggacagaagctgttcagagagtggtgctgaagaaagctaagtggcatagggattcccygagacccactgatagatgtcactccaaagcatgggaaatgctctgctgggagctgtcttattaggcaaccgaaaagctcagcaccatcgtactgcagcatatgttactctgttacagaatctgaaacaaaaccttttaagcaacaccactgtccagttttcatatgttttatagtgtgtaattcaggaaggatttttcct

SEQ ID NO: 1559 - DNA, 401 bp, Homo sapiens
tcattttatgcagaaaattggaaaggagcagatgtttattcctaagctagaattttgaaggccaacaattaaaataaacatgtctctgccaaaacttgaactaaattgaaaaatttagcatataaattaaagctcacttaaaactaaatttatcaaggaaatacatttgttttgcattgctggtttcaattattctgaaargacttttatttttatggaacactgaagatttttaaaagtttcaaacaatttattggacaattgcaccatttaaaatgagttacaaatgtcttgcttaaatgtatgagctattagcacatagttgatgaccttatagagagacattaaagcaaccatatcctcaagtttatgtctatattcccaggggagtacaagaaact

SEQ ID NO: 1560 - DNA, 401 bp, Homo sapiens
taatggagagattagcatggattagattagcttgtgtacaaaggttgtacaaattgattgctgtgatttgtaggctgggctgatctttatagtcactggcatgacttcttaagcattatagtcatgatttctttcatgtggtttacatgtggcaacaagaaaagcacatttccctcgttaccaaaaccttgtgtctcccartgggaacttgacatagactcaaaaacataagacgtgtacatataatattaaggagatggcactggtcatctggcctgctgtctgggatgacagcacacattggccaaagacagaagagttcccaaaacagatgttcagagaagatggctagaatactgttgaaatgtggtctagaataattatgaacataagcctaaaaa

SEQ ID NO: 1561 - DNA, 401 bp, Homo sapiens
acctgatgcctataggttgaggaaattgtgtatttgtgaatagtaatagcacagcagccactaggcctcccagtcgtactggagatttctaaaaggcaaagtgtttttagtttgttttaggtaataggttgatatttagcctattaaaaaggcagaccctggcttgacagacaaaaattaataattaatttgggagccagrtacagacttaggttttttgaattcttgtttctatattcttattttggaagtttacagtttggttttatatgcaggggtgttagatgaaggtgtattgttttgcaaatagaaacagtctcaggagacaaataacaatggcatgagaaatttatgaagtttatttttagcagcactttcaggcaaggttttgccatcaatat

SEQ ID NO: 1562 - DNA, 401 bp, Homo sapiens
cttaaaactaggaaaaactgagctttaagggcccatgaaagtccttggcttgtgggtttgctggctctttgctagaattatattttgtttttttctggttcagggtaccgtaacagaaggtgggaagctatatttttcatgaaactgattgcttttctaattaacaatcttgctaataaagcaccactgtacagcagatayagtgtttttaatgtcatggatattgtacctgaaagtaagtgaagaagtgtcagatagtttctgccaatatttgagcagtcttagttctaactgctacaattatgcaaggtatttgtcttagaagagcaatggccatttgagtaagactttccatatggtgttccacagtcactgggagaaaatgggcctttttttttcct

SEQ ID NO: 1563 - DNA, 401 bp, Homo sapiens
gctttcattgcatcattagacagaattgtgtgaccattcccaaagagattgacagtgttcatggcaggctgtataggaatctttctgtgtgcaggctggtctacaatttagcataataaagatctggccttatattcataggatctagccaggaaaattagtcttacctcagggtttaaagaaatgagggtgtgtcccagrgggatctgtctgtggccagcaggaaatttaattttaaaaactgaagaatatacaatagttcaggcactgaataatttgagcctgcgaaggtgcttctgccacatatattatcatagtgttagtaaggccaggaaggtctgaagtttgtatgagttcacagatattttgaaagactcatgcaggtatttttgatatgattc

SEQ ID NO: 1564 - DNA, 401 bp, Homo sapiens
aaaataatcttctataaattatgcgtattaacacagatatgtagcaaactataaaggttattttgctctgaagaggaattcagaattagaacttggatgtagcaggacacctctgttctcattgccataaagaaaaaaaaaacaccttttatattgaatttcagtgaaccttgcagccagcatctgtcccattaattttcrtatacgagaacaatgtggcatgattactcaccagcaacagaagtagcagttttataaatcttatgttgtagtggctggaagggacagggttgtgctctcattgtttccatattctttgtgaaattcacctttgcagggggtggtttgctctttctcttccagatgtgcacagaaatatgccatgtcactaaacgtcatgt

SEQ ID NO: 1565 - DNA, 401 bp, Homo sapiens
gaggaggtttttgcaagtggttgtagcctggttttgaatgaaggtgaaaatgctctttttgttagctctagatcagcagaggtgaataagcatcatgaatttaggagactggcgtttttttttacataaaagttgctttgttgctaattagtagattagaattcctttaattgcattctgaccaaagacttttgggtgttyaggagggcaagttagcatgtgttgcatttgaatttatacatttgagacacattttcttactgaagctgatattcatgaagcagaaaagataaaaacttgtacatacctttttatttcttgattttaatgttgaagttctattctcagaatggattttataggcaacaatatgcacttaaatttatgatctgtttacgaga

SEQ ID NO: 1566 - DNA, 401 bp, Homo sapiens
aagttctattctcagaatggattttataggcaacaatatgcacttaaatttatgatctgtttacgagacctcactgtattttgacagaggtcaaaataagggaaatcaatcttggttctcattccaaagagttttttttcctgatatcttaaaaaggctttattacattatgttgatatccatggcagagagttccaaagrcatccccatgaaagggctataaatgtgaggtttgaaaccaaggcaagtcaagcagggtaagcaatcttttcacccaaggttttaaaataactgctgataagaccttctcacagattttcattcatttcttcctagttataggcaggaaattctgaaagcaggtgaattctaaaattaccttataacttgatttcagaata

SEQ ID NO: 1567 - DNA, 401 bp, Homo sapiens
caacaatttgtgagatagaatagtaacgacaaacatacataagagaaaaggcagaattagagtacagtattttaaaagctttcaggcgctcaataaatgctcactattgttaaagagagagaaaaaaggaagtcctgtataatacatcaataagattttaattttcagttattattatttgagctttatttcccagctctstgacacagatttaggggtggtgtggatattcttagagtggaaattattgaactcttagattaaaggtactcgagttcctagcttgccctgtaactacacatatagagaagatcactctcgtaggtgctagtaagtaggagataaaagttttagggggaaacacagagggatactcagaactgggagcagtcctaaggtgg

SEQ ID NO: 1568 - DNA, 401 bp, Homo sapiens
ggataggggagttgtgtgttcataatgccactttgccaccctgaaatctatgcagataatctacttggaaggctttgagccccagtggaatacagaaccatgtaagtatcctgcattgatttacagcacctgctacagctgcttggatcttggcaggcattttctctcctgccaaatgctgttgaaattgctgggctggtytagatggaggttatatttactggacatgtttataatcttcagagtgatctaagccatagagagctaatttcccaaagatcaatgactaagggaggatttcagaggttatcctctttatccaatttcctgtgtcctaatgagatggctgaaacctgtttggaatctttctgattaggaactcttgtgagagtcaataaaga

SEQ ID NO: 1569 - DNA, 400 bp, Homo sapiens
atctaagccatagagagctaatttcccaaagatcaatgactaagggaggatttcagaggttatcctctttatccaatttcctgtgtcctaatgagatggctgaaacctgtttggaatctttctgattaggaactcttgtgagagtcaataaagaatatgacattcataaatctaaataagaggcgacttggcagcctgtaggtgattcatgccacgagaagcctttcccctgcccccaacaggatgtgccatgggtggccaacctgagacaaggtcagacttgaaccaagagtcttgagaggacttggcctctcctggttaattcagaggactcttctggctattagaatgcgctgtgtatattttttacctgtcttgatttaattcaattcaattgcca

SEQ ID NO: 1570 - DNA, 401 bp, Homo sapiens
tccaaatgcttgctagctattttctgagtatcagttatatttaccatgatcctgaggagcagaccctttattgtgtcccagttcagtttgcatcgtcttcatacagcataaggcaacagtgatagaaataatctctagagtaatctccaagtacctttccaaagctgctatgcctcaagtacttcctttaacctttaagcrtctgccttgcatacagtcctcttgggccactcttggcaaaatatttggaaggagatctggaacctgattatttctcaatgaaaaaataatttgcttttgcactgggaagcgacagtaatccaatataagcatgccattgaaaaccttcatgccctactatttcttttaggacttttgtgaaccctttctctttgatacat

SEQ ID NO: 1571 - DNA, 401 bp, Homo sapiens
gcattctgtggctccatggtggattctggcatacttttttcaggatgctcttttccaggtcaatatttaaagaacttgaagaccgcaaagcttctgctcttgagatgagaaggagcttctcctccactaatgatctgaatttaacactggatcacttaaagccaggttcatttgcaaaatatttgctcagctttgatgctrtaaaagcctctccaaagctaaggaaaccctgagaaatggattattcatgtgactctgcagagcttggtatcaggcattgcttgtatttaatctttccctaagcattaacattctaagcttatgaaaaatttgtgacgtatgctaaatatattccatccagttatgatcagagtccagtcacctgagtgtaagatttctgc

SEQ ID NO: 1572 - DNA, 401 bp, Homo sapiens
gctactgggtggcctctgacatgatgtgtttagttatcaaacatgtcagctaataccatggagagaacacatgtattaaaagtgacagacataacaagggtcaaagattaaaggtgaattgcaaagggctttttactgcatctctgttgttataacagtttctagagtaggttgaatacatgagcaaaaagaatgatgagsagtcatggtgagcagaagctctcttctcaggcaaagcaggaatttttttccccacattgagctaaatattctttaaatgctataaatgttactacatatctgtgctgtttgtgggacagcacaaacatatttgaaacattcagcagttctttctcattaacttccatttttctaattttcattggttatattttcctgat

SEQ ID NO: 1573 - DNA, 401 bp, Homo sapiens
gaaaaaggatgttgcactgtatgtaataaaagctatgaattttggcacttttgtaaactgtaaagatgtaaatgttccttaattattttcagtagtcagacttatgtttcttccagttgtatttccaggctgagacaatacaaaagatggacagctctaagttgattatcaagctttaaatatgtttcacttgattaagarcattgaaggtgagaatggaattatgtaggcttcactgagtatccgtaaagttgggaacaatgatatacaacacagaaaagaagctccataagaaaacagctgcaactaacccatctggaaagagacctcaatcaaaatgatacttagcgaaagaaaaatactttcagtgatcaaattatttgtctgaccaatgcttggtg

SEQ ID NO: 1574 - DNA, 401 bp, Homo sapiens
aaaggatgttgcactgtatgtaataaaagctatgaattttggcacttttgtaaactgtaaagatgtaaatgttccttaattattttcagtagtcagacttatgtttcttccagttgtatttccaggctgagacaatacaaaagatggacagctctaagttgattatcaagctttaaatatgtttcacttgattaagaacaytgaaggtgagaatggaattatgtaggcttcactgagtatccgtaaagttgggaacaatgatatacaacacagaaaagaagctccataagaaaacagctgcaactaacccatctggaaagagacctcaatcaaaatgatacttagcgaaagaaaaatactttcagtgatcaaattatttgtctgaccaatgcttggtggaa

SEQ ID NO: 1575 - DNA, 401 bp, Homo sapiens
ccaattgctcttgtttggggcagagagcacagatttaagaaacaaggatacaataaaatgaaatttggctgcagtacaaggttaatgtctctcctcacctcccaaagagtaccaagggatcattcattgtcacagctgttggggtttagagctctcttctcatccaaatgccagtactttccacaaaaagctcttccccakggatgccctaataagccagtgtgtcctgtataggtgagacttgccctggctgtctctatccaagtggtgacataagctcatctaaagcctttcattaatgcaaacaatgacccagcccatggtggcactgattcttgaagctgaagacttggagaaggagcctgattttccatcacactgattgttgttttcagtaagat

SEQ ID NO: 1576 - DNA, 401 bp, Homo sapiens
aggtaaactggagagtcatctctggtctactttcctcttcagtttggtggaagtttcacgtaaaattacatgtgaaagtccttgagaattgaaacaatgggcaaatctatagcagaatgcttgttgaattctatcagctttcccaaggtgcaggctgcccatgtttagtctttctcactttccaatccattttccacactrcagccagcgtgttttttctcaatggaaatctgatcatatcaacctcttttttaaaaaaaatcctaaatatcttctccctctcacagaataaaaatcacaattccttaagaaactgtcaaagccttctcaatctgtgcctttcatctctgaccattggtatctttcttctgataggataaaagttcattgaatgttcaagc

SEQ ID NO: 1577 - DNA, 401 bp, Homo sapiens
gtttcacgtaaaattacatgtgaaagtccttgagaattgaaacaatgggcaaatctatagcagaatgcttgttgaattctatcagctttcccaaggtgcaggctgcccatgtttagtctttctcactttccaatccattttccacactgcagccagcgtgttttttctcaatggaaatctgatcatatcaacctctttttwaaaaaaaatcctaaatatcttctccctctcacagaataaaaatcacaattccttaagaaactgtcaaagccttctcaatctgtgcctttcatctctgaccattggtatctttcttctgataggataaaagttcattgaatgttcaagccttctcttttgcttttcagagcttggccatgtggttttctctgtctgaaaca

SEQ ID NO: 1578 - DNA, 401 bp, Homo sapiens
tttcacgtaaaattacatgtgaaagtccttgagaattgaaacaatgggcaaatctatagcagaatgcttgttgaattctatcagctttcccaaggtgcaggctgcccatgtttagtctttctcactttccaatccattttccacactgcagccagcgtgttttttctcaatggaaatctgatcatatcaacctcttttttwaaaaaaatcctaaatatcttctccctctcacagaataaaaatcacaattccttaagaaactgtcaaagccttctcaatctgtgcctttcatctctgaccattggtatctttcttctgataggataaaagttcattgaatgttcaagccttctcttttgcttttcagagcttggccatgtggttttctctgtctgaaacaa

SEQ ID NO: 1579 - DNA, 401 bp, Homo sapiens
  misc_feature (1)...(401): n = A,T,C or G
cctcatcttctttggctactgagttantaaccatccttcatttatctcagggagcaaaggcaggatttccgtgggtgtccaaggtccttactcacagtcaggatgcatggcagtacccttaataactacagattcagaatcacagaagacatttaccgantatgtattttctgccaaaccctgtgccaggtgttattagarcattacttatgaaatatttggtagtgtggatgaagaggcagcttttcctgcttacacaatacagaaatatgatttcaaaaatctattaaaattttattaatctcagaaggcatgatttctaattgtgtttgatcttacacttgttatgatttaggaattcacatctgagttggttgcatgatgctatagttggcaacang

SEQ ID NO: 1580 - DNA, 401 bp, Homo sapiens
attacttatgaaatatttggtagtgtggatgaagaggcagcttttcctgcttacacaatacagaaatatgatttcaaaaatctattaaaattttattaatctcagaaggcatgatttctaattgtgtttgatcttacacttgttatgatttaggaattcacatctgagttggttgcatgatgctatagttggcaacatgaytctgaccgccaccatcacaaatagaggttagaaaatattacttatgtgaaaataaatgccatttctggcacctaaaacagctcttttctcaccttcctatgatgaggttttattgagcttttgcaggaaagaaaagaaagaaatctgcattcaggtttcaggagtaaagaggctgctcattaacaaagccgtttcaaaat

SEQ ID NO: 1581 - DNA, 401 bp, Homo sapiens
agtgagtaaagtgcagtttctgctgcttggttactgtagttcattcggggaatttcatcttggtcgtgttgaatgcagtggttagatcctgtgaagttgtttaattaaaggtgttctagtagtcaaagccatgtctaaaaccccgtttgtttaattctttagtaatgtcaacattcctaaatttcatgtagcctaagagayttttccactggcttcaaatctgagctttgccactttggtgtcctttgctatgaatgttcaatgaggcgttctgagatcaccaagaatagaagagacacacccccggctgtcagaagtttaaccttggagaatgccatgaagggcaattctggaagaaaaaagagaagggaattcctcgtaggtttaagatcagaaagtgg

SEQ ID NO: 1582 - DNA, 401 bp, Homo sapiens
ggagacaattgttatttttaaaaatgtctttcttattttaactacaaggacttggcttgcttagaggctcttgctcaggagtctttaaatgcaaatgagggaaaccccaggttataaagcatctgcttctgcaggttttcaatcctgttaccttagcaacatttgcccttgtattccacgcatcaccttgacagcctgcakaatataagggacggagcggagcaggggctcggggtgggagcctggaaagaaaactggggctcaaggaggtttaatatcggttagtagcttgggatccttcggataacggctgggcaatgaaaataaaaagccccatttccagaaatcaaagaacttggggagaaataaacacgctggttcaaaggaggggaaaatatatc

SEQ ID NO: 1583 - DNA, 401 bp, Homo sapiens
aattgttatttttaaaaatgtctttcttattttaactacaaggacttggcttgcttagaggctcttgctcaggagtctttaaatgcaaatgagggaaaccccaggttataaagcatctgcttctgcaggttttcaatcctgttaccttagcaacatttgcccttgtattccacgcatcaccttgacagcctgcataatayaagggacggagcggagcaggggctcggggtgggagcctggaaagaaaactggggctcaaggaggtttaatatcggttagtagcttgggatccttcggataacggctgggcaatgaaaataaaaagccccatttccagaaatcaaagaacttggggagaaataaacacgctggttcaaaggaggggaaaatatatcagaact

SEQ ID NO: 1584 - DNA, 401 bp, Homo sapiens
gaggcaggccatctgctgcagtgtttccctggaaacccccagcaacgcccctcccggagctcctccgcggtctcccccactccatccccgcgcagcggaggagcttgccggtgatgtcactgctgctagctgggagggaatcccaggacctgcgtccctcgggtagagccaatcatggtcggctctggatgctggaaaccyggggcttttaaccagaaagaattgcaaaagcaatatgcaattcatcacagtccacaaagcacagttcctaacagattctgaaaacgtgattttaaaaaaaatgagatttatccgtaaacgagggctaggctacagttggtagggcggctgtcaattcttctacggagttttaacctacactcaatggatgcatgaaaaaa

SEQ ID NO: 1585 - DNA, 401 bp, Homo sapiens
tttccctggaaacccccagcaacgcccctcccggagctcctccgcggtctcccccactccatccccgcgcagcggaggagcttgccggtgatgtcactgctgctagctgggagggaatcccaggacctgcgtccctcgggtagagccaatcatggtcggctctggatgctggaaacctggggcttttaaccagaaagaatygcaaaagcaatatgcaattcatcacagtccacaaagcacagttcctaacagattctgaaaacgtgattttaaaaaaaatgagatttatccgtaaacgagggctaggctacagttggtagggcggctgtcaattcttctacggagttttaacctacactcaatggatgcatgaaaaaaagaaatgaaatgatttttttagc

SEQ ID NO: 1586 - DNA, 401 bp, Homo sapiens
ccactccatccccgcgcagcggaggagcttgccggtgatgtcactgctgctagctgggagggaatcccaggacctgcgtccctcgggtagagccaatcatggtcggctctggatgctggaaacctggggcttttaaccagaaagaattgcaaaagcaatatgcaattcatcacagtccacaaagcacagttcctaacagawtctgaaaacgtgattttaaaaaaaatgagatttatccgtaaacgagggctaggctacagttggtagggcggctgtcaattcttctacggagttttaacctacactcaatggatgcatgaaaaaaagaaatgaaatgatttttttagctactttaaaaaataaaggtaatgaatatttcttatctatatgcatatatatat

SEQ ID NO: 1587 - DNA, 400 bp, Homo sapiens
ctccatccccgcgcagcggaggagcttgccggtgatgtcactgctgctagctgggagggaatcccaggacctgcgtccctcgggtagagccaatcatggtcggctctggatgctggaaacctggggcttttaaccagaaagaattgcaaaagcaatatgcaattcatcacagtccacaaagcacagttcctaacagattcygaaaacgtgattttaaaaaaaatgagatttatccgtaaacgagggctaggctacagttggtagggcggctgtcaattcttctacggagttttaacctacactcaatggatgcatgaaaaaaagaaatgaaatgatttttttagctactttaaaaaataaaggtaatgaatatttcttatctatatgcatatatatatat

SEQ ID NO: 1588 - DNA, 401 bp, Homo sapiens
gcggaggagcttgccggtgatgtcactgctgctagctgggagggaatcccaggacctgcgtccctcgggtagagccaatcatggtcggctctggatgctggaaacctggggcttttaaccagaaagaattgcaaaagcaatatgcaattcatcacagtccacaaagcacagttcctaacagattctgaaaacgtgatttwaaaaaaaatgagatttatccgtaaacgagggctaggctacagttggtagggcggctgtcaattcttctacggagttttaacctacactcaatggatgcatgaaaaaaagaaatgaaatgatttttttagctactttaaaaaataaaggtaatgaatatttcttatctatatgcatatatatatatatttcattataattgt

SEQ ID NO: 1589 - DNA, 401 bp, Homo sapiens
  misc_feature (1)...(401): n = A,T,C or G
taggctacagttggtagggcggctgtcaattcttctacggagttttaacctacactcaatggatgcatgaaaaaaagaaatgaaatgatttttttagctactttaaaaaataaaggtaatgaatatttcttatctatatgcatatatatatatatttcattataattgttgcttctgcagaaaattgggatagaaatctcrgatgagctgtagttacacggagatctacagcaatgcaatgtttagctagcatgcattttgtcatccaaggctagtaggtgaaatatttcctttacctgtcttgatgcacggtggagaaangagacccgcttcgttttccctctaatctagagagttaacctcctccaggtagggttgaaaatatgaacagagctgctttt

SEQ ID NO: 1590 - DNA, 401 bp, Homo sapiens
cactcaatggatgcatgaaaaaaagaaatgaaatgatttttttagctactttaaaaaataaaggtaatgaatatttcttatctatatgcatatatatatatatttcattataattgttgcttctgcagaaaattgggatagaaatctcagatgagctgtagttacacggagatctacagcaatgcaatgtttagctagcaygcattttgtcatccaaggctagtaggtgaaatatttcctttacctgtcttgatgcacggtggagaaatgagacccgcttcgttttccctctaatctagagagttaacctcctccaggtagggttgaaaatatgaacagagctgcttttgcaagactgtgttgcctctaaatgtgatttaactcgcatattcagaatctta

SEQ ID NO: 1591 - DNA, 401 bp, Homo sapiens
  misc_feature (1)...(401): n = A,T,C or G
actgcaaccatcacatgtggctctcagagcttctagttccctggaaacagganttctatctgccatcaccaggtataaggtgccaccacttgaagggatctgccctatcaaaaatgaggaaatatattgatcaaaatggctggagaaagtgaccagccaaaacacagcttcacagtcttgcctgttttaagtagattctayttccattttgccggtgacagcactaagcaaataagcaatgttgccaatccgagaacagcctgcattcaaggtattcaatcaatcaaagagagacaatggcattctctcaaagatcagatgttttgtagtgcaactatgttgttctgtttttctttacttcaattatcagatagacaggaaaaaatacaacaaaatagcat

SEQ ID NO: 1592 - DNA, 401 bp, Homo sapiens
ctggagaaagtgaccagccaaaacacagcttcacagtcttgcctgttttaagtagattctatttccattttgccggtgacagcactaagcaaataagcaatgttgccaatccgagaacagcctgcattcaaggtattcaatcaatcaaagagagacaatggcattctctcaaagatcagatgttttgtagtgcaactatrttgttctgtttttctttacttcaattatcagatagacaggaaaaaatacaacaaaatagcatgtagttgatttgccaaaaataaatagcaaagaaaaaacaagaataactagaaaacacgtgacaattttagaaaaaatgtaatcacatttccaattactagacaagatataaataaagagcatttataaaatgtttaaat

SEQ ID NO: 1593 - DNA, 401 bp, Homo sapiens
aagagagacaatggcattctctcaaagatcagatgttttgtagtgcaactatgttgttctgtttttctttacttcaattatcagatagacaggaaaaaatacaacaaaatagcatgtagttgatttgccaaaaataaatagcaaagaaaaaacaagaataactagaaaacacgtgacaattttagaaaaaatgtaatcacrtttccaattactagacaagatataaataaagagcatttataaaatgtttaaatccattcttttaaaacgataaacaacttctctaactggaaattactgtgcagctgctactttgtattttattggtataaaataactttagagttctatttcattgcattgcaaaggtgtaatactttgccataattaggtttaaatct

SEQ ID NO: 1594 - DNA, 401 bp, Homo sapiens
attctctcaaagatcagatgttttgtagtgcaactatgttgttctgtttttctttacttcaattatcagatagacaggaaaaaatacaacaaaatagcatgtagttgatttgccaaaaataaatagcaaagaaaaaacaagaataactagaaaacacgtgacaattttagaaaaaatgtaatcacatttccaattactagrcaagatataaataaagagcatttataaaatgtttaaatccattcttttaaaacgataaacaacttctctaactggaaattactgtgcagctgctactttgtattttattggtataaaataactttagagttctatttcattgcattgcaaaggtgtaatactttgccataattaggtttaaatcttgcaaaaatagaaac

SEQ ID NO: 1595 - DNA, 401 bp, Homo sapiens
atcagatagacaggaaaaaatacaacaaaatagcatgtagttgatttgccaaaaataaatagcaaagaaaaaacaagaataactagaaaacacgtgacaattttagaaaaaatgtaatcacatttccaattactagacaagatataaataaagagcatttataaaatgtttaaatccattcttttaaaacgataaacaacytctctaactggaaattactgtgcagctgctactttgtattttattggtataaaataactttagagttctatttcattgcattgcaaaggtgtaatactttgccataattaggtttaaatcttgcaaaaatagaaacctgcattttttggttttatattagtttttttaggtgatgctattcaatgggaggatataattgc

SEQ ID NO: 1596 - DNA, 401 bp, Homo sapiens
aaaaaacaagaataactagaaaacacgtgacaattttagaaaaaatgtaatcacatttccaattactagacaagatataaataaagagcatttataaaatgtttaaatccattcttttaaaacgataaacaacttctctaactggaaattactgtgcagctgctactttgtattttattggtataaaataactttagagtyctatttcattgcattgcaaaggtgtaatactttgccataattaggtttaaatcttgcaaaaatagaaacctgcattttttggttttatattagtttttttaggtgatgctattcaatgggaggatataattgctgtttctatgaccttgggtaagtcatttaacccctctgaaccttggtttccttctttggttgaaaat

SEQ ID NO: 1597 - DNA, 401 bp, Homo sapiens
taaaatgtttaaatccattcttttaaaacgataaacaacttctctaactggaaattactgtgcagctgctactttgtattttattggtataaaataactttagagttctatttcattgcattgcaaaggtgtaatactttgccataattaggtttaaatcttgcaaaaatagaaacctgcattttttggttttatattagwttttttaggtgatgctattcaatgggaggatataattgctgtttctatgaccttgggtaagtcatttaacccctctgaaccttggtttccttctttggttgaaaatagagacagtaatacttgacctctctctccagattttgatcaggttaaagaggccaataaaaatgaatgtgattttgtaaatagtgatacacaca

SEQ ID NO: 1598 - DNA, 401 bp, Homo sapiens
gtttgaaggtaagtgttttcagaccctggtttcctaggaccaagtcttggcctcatcaaacataatcacagtctccttttaccactttggcccaaacactatgaagccttttgcccactggctcagcttctcttgccatatactgattattaatgccagtaaaatacctaggcaccttggcagtaacttacgcaaatatgyatatttctaattacagggaaattgttagaacatgacttggattagagatacacagctaataattcaagaagaaataatgctttgttttcagtagaggaaaataaaagcttcatttgaataatttttcctcctttctctccctttttgttttgatacttacgcatgggcaataccgtaaactggcaataaaagaagttatc

SEQ ID NO: 1599 - DNA, 401 bp, Homo sapiens
taattacagggaaattgttagaacatgacttggattagagatacacagctaataattcaagaagaaataatgctttgttttcagtagaggaaaataaaagcttcatttgaataatttttcctcctttctctccctttttgttttgatacttacgcatgggcaataccgtaaactggcaataaaagaagttatcgcaaacaktgtggccatttctcctcagacactggacatcctacatctgttatatggtttaccatccatccacttccttgctatagctccaggtccacaattctttgtcatgtcattgctcttgacctataccatgactgataaccatgtacatttttaagaaaaaaatgtaaattaattaaaataatttaaaaacacatatccatatg

SEQ ID NO: 1600 - DNA, 401 bp, Homo sapiens
aagctgaatcagaacacttctttgccaagacttgtctgcaaattcttaacctttttttgtttgccaagaacaaagaaaaattgttgtaaacttagctgctgctgtaacatatgagcagtcttttccgaaaatgcaaattagacaaacaagaatcattacatcatttgcagaaatgcagttacatttggtttctgctattgygtgtgtatatatatatatgtatatatattactttcatatcttacttgataccttttgtagtgctttaccattttcaaagcacttgcatatgtgtcgtattatttgatcttttctgagatccaaagtttttaacatgcttcatgcttgaaaactttgatacttcaatttatatgatgcatgtaacatacaacaaatgtttt

SEQ ID NO: 1601 - DNA, 401 bp, Homo sapiens
ttaaattgcggccatcagaaaataccgtgagaaggtagtgtgtaggtaatggttcagttagcattgaccccagaaaatggaaaaccaagagcaagtcacttttaaagtgaagcaatagattttgaatatggattgttccaactcaccacttcccgaccacaacacaagagtatttcactgtaaattaagagtctaagttarccacagctgtggtataactctgagaatgttttctctacatgtagacaattctggatccttccgtggtgcccgttaccctggtctttaacttttgtcctttgcaggggaggggtcaatgccttcttatttccttgctctttagaattctccaccagagggaggacaagggaaggagtaggtttcacgcgcagttctgagta

SEQ ID NO: 1602 - DNA, 401 bp, Homo sapiens
gtaggtaatggttcagttagcattgaccccagaaaatggaaaaccaagagcaagtcacttttaaagtgaagcaatagattttgaatatggattgttccaactcaccacttcccgaccacaacacaagagtatttcactgtaaattaagagtctaagttaaccacagctgtggtataactctgagaatgttttctctacatrtagacaattctggatccttccgtggtgcccgttaccctggtctttaacttttgtcctttgcaggggaggggtcaatgccttcttatttccttgctctttagaattctccaccagagggaggacaagggaaggagtaggtttcacgcgcagttctgagtaaagtttgaatctgagaaaccccacattcacgaattaaggat

SEQ ID NO: 1603 - DNA, 401 bp, Homo sapiens
acacaagagtatttcactgtaaattaagagtctaagttaaccacagctgtggtataactctgagaatgttttctctacatgtagacaattctggatccttccgtggtgcccgttaccctggtctttaacttttgtcctttgcaggggaggggtcaatgccttcttatttccttgctctttagaattctccaccagagggargacaagggaaggagtaggtttcacgcgcagttctgagtaaagtttgaatctgagaaaccccacattcacgaattaaggatctccagttctgtgtctttattctacccctccctgcctgcttttccactcggcagaactgagtgactttcagcggctgcagtaattttaattattctgagtcgtgctccgaactatgtttt

SEQ ID NO: 1604 - DNA, 401 bp, Homo sapiens
tgcccgttaccctggtctttaacttttgtcctttgcaggggaggggtcaatgccttcttatttccttgctctttagaattctccaccagagggaggacaagggaaggagtaggtttcacgcgcagttctgagtaaagtttgaatctgagaaaccccacattcacgaattaaggatctccagttctgtgtctttattctacycctccctgcctgcttttccactcggcagaactgagtgactttcagcggctgcagtaattttaattattctgagtcgtgctccgaactatgttttttatcagttcctctgaaaattaagttgtagtaagagacgtagtttaagggcacccccttagaagaggccaggttattttttaaggaaaagctgaagatttctaaca

SEQ ID NO: 1605 - DNA, 401 bp, Homo sapiens
acacggcgcagacccagcaggagagcgcaacctagcatctttaaggttcgcttagcccttcctgtgcacctggaaggaagccttatcttaaactcccttccacctagagtttattttcgcctgcgtgcgacagggcttttgtacttaagtgagttaaggaatgaaccccgaactcttctgggaaagccaccaacgttcccmccgcacccctcccagggttcctgaccacggagactctgcttggggcacaggtgtgggagtcgcaaacttttctctgcgccgtccttttccgcgtggaatgggacggagcagccctcccaggcgctgcctggctgcggaggggagcgggcagcgagagcctcgggtctccgcctgggttcccgggtctccggggcgctggc

SEQ ID NO: 1606 - DNA, 401 bp, Homo sapiens
cgccctgcgctctgagcgcccgttgagtcgcgcggtgcttcccctcctgggggccgccgctcacctgggcgccgagtcctaccgggcgcctacgcccagagctcagggcaagggacagcagtcccggccgcaccctcccagagtcccgggagcgcttcgctccctggcacggcccctccccagcgccttagcggctgagcycagcccgggagtgggacctgggctataggagtcgaggctgcgtgcgcgcgtgccccgcgccataagcgctttgcacgggggccgtgtgccctctagcgggaaacgctggaatgggccgcctggagggagagccggtcccctcggtgtgcctggcagcgcagaagtgggtggtcgagcaagaggccgcgtgggaagttagc

SEQ ID NO: 1607 - DNA, 401 bp, Homo sapiens
aaaaacttaatctaaaagaagaaatattgagcaagcattgggtgcttcatgaatggcctaaaaatatatttaagtctatcacctggaggttcgttcatttattgccaggaaagaatcaatcccacttttttttctctttccctgtggctcaactccaggaaggtgttttaattgattggtgggaagattttaacacagacraaacttataagctaagcatcattatttctagtacagtggcttcaccacattatagggtaataaagttaaaagctgccgattgtttcagaattattttcagaaatttacatcctctttattcctattaccttgagaaagagttcagagaatgggcttagtcagcatgcaattatggtattagataaagcatacagtttggt

SEQ ID NO: 1608 - DNA, 401 bp, Homo sapiens
acttttttttctctttccctgtggctcaactccaggaaggtgttttaattgattggtgggaagattttaacacagacaaaacttataagctaagcatcattatttctagtacagtggcttcaccacattatagggtaataaagttaaaagctgccgattgtttcagaattattttcagaaatttacatcctctttattccyattaccttgagaaagagttcagagaatgggcttagtcagcatgcaattatggtattagataaagcatacagtttggtctaaaaccaagatgcagctagtctcatcagggtactttaatcaatcaagggttgttaagaaggtaggaatgtcagtctaacttcattcctttgaaggtgatcagcctttcttctctggaggct

SEQ ID NO: 1609 - DNA, 401 bp, Homo sapiens
ggctcaactccaggaaggtgttttaattgattggtgggaagattttaacacagacaaaacttataagctaagcatcattatttctagtacagtggcttcaccacattatagggtaataaagttaaaagctgccgattgtttcagaattattttcagaaatttacatcctctttattcctattaccttgagaaagagttcakagaatgggcttagtcagcatgcaattatggtattagataaagcatacagtttggtctaaaaccaagatgcagctagtctcatcagggtactttaatcaatcaagggttgttaagaaggtaggaatgtcagtctaacttcattcctttgaaggtgatcagcctttcttctctggaggctttgaagattttgtcctatggct

SEQ ID NO: 1610 - DNA, 401 bp, Homo sapiens
agcattgacctcctgggctcaggtggtccttccccctcagcctcccaggtagccgggactacaggcacatgccaccatgccgagctaatttttgtattttcatagagatggagtttcaccatgttgcccaaactggactccaacttctgaggtcaagtgatcctcctgcctcagcctccgtaagttgggggattacaggcrtgaaccaccgtgcccagcctacatacgctcctttaacacaggcttttggttctttgaaattaccaacattcaggattcttaatggcatcagagaatataaagcttgaaactatctagaatttttttaaggaataattttctaatcttggttctctgcttctgagtatattttatttgggcattttatttttctccaagat

SEQ ID NO: 1611 - DNA, 401 bp, Homo sapiens
acagtgcctctgccaatatcaccatcgtggaatcaaacggtaagagatacctacggtattctgttcctcaatctgtaacaagagtaatcaaaacatgtggtaagactcataatagactggtgtgttaaatctcattgtgaacaaattaaaaacagagaaagaaaaccagatgtttcaaggatcttgtatgtctttcataamtttctgtactctatgagattatatagacctgaaatatacatatattttttacaaaaggattttaataaggccatgaatggcagagataggttgggttgctaaaatataggggctatactatttttttaagttggtcagtgagggcagtcaagtctttggctctctgaacaacagaatacagtcatatatatatacaggat

SEQ ID NO: 1612 - DNA, 401 bp, Homo sapiens
aaatctcattgtgaacaaattaaaaacagagaaagaaaaccagatgtttcaaggatcttgtatgtctttcataaatttctgtactctatgagattatatagacctgaaatatacatatattttttacaaaaggattttaataaggccatgaatggcagagataggttgggttgctaaaatataggggctatactatttttktaagttggtcagtgagggcagtcaagtctttggctctctgaacaacagaatacagtcatatatatatacaggatatatatacacaatatgtatatatgcacacagaatatatgcatattatgtattatatatgcgttatatatgtatatatgtttacgtatatataacatatgtattatatatgtattatgtatgtatta

SEQ ID NO: 1613 - DNA, 401 bp, Homo sapiens
ctgttttttcttcttttatctttgctacctgagaaaatcttgctactagatatccccaactattgtatgatttatttaattagcatggtttgtttgatcctaatgtaattattctattgctctagcagactttgcatggacttttcagcactttctggtccggatgtttatgcagatccaagttgcctggaaatactctcratcttgtttgtttatttatttggcatgcatgaaaattggctttcactctcttggaatccaggggctattctctttggtttcatgttttctcaaaatcaagaccacatctgaaagaaggaattttctttctcacctgtggtgtgtatctcctcagagtagtctctcttggaagttcagataatgcttggtgtgtgggatat

SEQ ID NO: 1614 - DNA, 401 bp, Homo sapiens
ggtgtgtatctcctcagagtagtctctcttggaagttcagataatgcttggtgtgtgggatattcttacagatggattgactccattttcatcccttttaaaagtctttgggtctagactatggtaatattcctttgtggtctttgagtattgcattctgacttataaatgcttcagcttctctgttgcacggtgttctastactcttttactaggcgatacccaagcctggcaaatttctaatttatgagtccaagcagcatgactcaataaagcctcattccacttttatgttttatagagtctcccattagaatatcagtatccacagaaggagcaaatacttcttcatgtaagtatacttaaatattctattcactggtttttaacccaaggcacta

SEQ ID NO: 1615 - DNA, 401 bp, Homo sapiens
taatgcttggtgtgtgggatattcttacagatggattgactccattttcatcccttttaaaagtctttgggtctagactatggtaatattcctttgtggtctttgagtattgcattctgacttataaatgcttcagcttctctgttgcacggtgttctactactcttttactaggcgatacccaagcctggcaaatttctmatttatgagtccaagcagcatgactcaataaagcctcattccacttttatgttttatagagtctcccattagaatatcagtatccacagaaggagcaaatacttcttcatgtaagtatacttaaatattctattcactggtttttaacccaaggcactatctgctttggaaggtcatgttcacgtctatcttctgcccct

SEQ ID NO: 1616 - DNA, 401 bp, Homo sapiens
tgggatattcttacagatggattgactccattttcatcccttttaaaagtctttgggtctagactatggtaatattcctttgtggtctttgagtattgcattctgacttataaatgcttcagcttctctgttgcacggtgttctactactcttttactaggcgatacccaagcctggcaaatttctaatttatgagtccargcagcatgactcaataaagcctcattccacttttatgttttatagagtctcccattagaatatcagtatccacagaaggagcaaatacttcttcatgtaagtatacttaaatattctattcactggtttttaacccaaggcactatctgctttggaaggtcatgttcacgtctatcttctgcccctattaagggtcagag

SEQ ID NO: 1617 - DNA, 401 bp, Homo sapiens
aggataactcatgttgctcataaacttgtcatagtcatggttacatttatgcaaattggcacaggcttttgttgttgttagttatagtactgcaaacacagtttaagatgttaagaccctttaaatcatgtataattatggactaatttcatcttgaaggaagaagtgataatattcttatctcctgccgtttaaagctgwaacatacctcaaagtagtggagattgtgccctacaaaatataatgtgcttaaagcggattttctcaggacttgaattctaaattttactgcttcagggactcatatgatggctatgtagtatagatttagagagagttttacagactcctattgacataagtgaacaaaatggttccttggaaaccgtttagatgtccaa

SEQ ID NO: 1618 - DNA, 401 bp, Homo sapiens
tcttgaaggaagaagtgataatattcttatctcctgccgtttaaagctgaaacatacctcaaagtagtggagattgtgccctacaaaatataatgtgcttaaagcggattttctcaggacttgaattctaaattttactgcttcagggactcatatgatggctatgtagtatagatttagagagagttttacagactcctrttgacataagtgaacaaaatggttccttggaaaccgtttagatgtccaatcacagtaagtgtggattacaggttcagatgcatattgtgtgcagtgatgtgcagcacagtgcttggggaagcctgtggtctgtattaagaacagtgcatttcttctagtgttttaatgactgttgttttaaaagaaaaaaacagtcagca

SEQ ID NO: 1619 - DNA, 401 bp, Homo sapiens
tggctatgtagtatagatttagagagagttttacagactcctattgacataagtgaacaaaatggttccttggaaaccgtttagatgtccaatcacagtaagtgtggattacaggttcagatgcatattgtgtgcagtgatgtgcagcacagtgcttggggaagcctgtggtctgtattaagaacagtgcatttcttctastgttttaatgactgttgttttaaaagaaaaaaacagtcagcattgaaactactgaaaggtaaagctcctgaaacctaacccaaaaggcatgctctcatagaaaactcttcttagtactttcagtgcggtgatagctgaggacatgtggtatatattacagtgccagggaatccaaacctctgcagtgtggagtcaccatg

SEQ ID NO: 1620 - DNA, 400 bp, Homo sapiens
tttagagagagttttacagactcctattgacataagtgaacaaaatggttccttggaaaccgtttagatgtccaatcacagtaagtgtggattacaggttcagatgcatattgtgtgcagtgatgtgcagcacagtgcttggggaagcctgtggtctgtattaagaacagtgcatttcttctagtgttttaatgactgtttttaaaagaaaaaaacagtcagcattgaaactactgaaaggtaaagctcctgaaacctaacccaaaaggcatgctctcatagaaaactcttcttagtactttcagtgcggtgatagctgaggacatgtggtatatattacagtgccagggaatccaaacctctgcagtgtggagtcaccatgaaaggctaatctaaaaat

SEQ ID NO: 1621 - DNA, 401 bp, Homo sapiens
gtagagaaagaaagaaaaaggaggaaaacgggtgggggccatggggactaggcttaactgatgcctgcctgcctctctttgatttgatggcctttattccttctaattggataaaataggaagtcactggcagtcctgtgtggctggggatactgattttactcagaccagcctgcagctctagagtgtgggtagagagcrgggagtgggggttgggagagggggaggaaagagagagaggagagaggacgggcttggatgaagaagggaaagaaagagaaagagactgaagcagagaagagccgcagaggaagaaagtgaatgagcactcaagaaggacaaagaggagtagtcgggggtggggtggaggcagggcggggaagggagtgaccgcccctcct

SEQ ID NO: 1622 - DNA, 400 bp, Homo sapiens
  misc_feature (1)...(400): n = A,T,C or G
catggggactaggcttaactgatgcctgcctgcctctctttgatttgatggcctttattccttctaattggataaaataggaagtcactggcagtcctgtgtggctggggatactgattttactcagaccagcctgcagctctagagtgtgggtagagagcggggagtgggggttgggagagggggaggaaagagagagaggagagaggacgggcttggatgaagaagggaaagaaagagaaagagactgaagcagagaagagccgcagaggaagaaagtgaatgagcactcaagaaggacaaagaggagtagtcgggggtggggtggaggcagggcggggaagggagtgaccgcccctcctggctgcactnttgcctccggagccctctgatcctgttt

SEQ ID NO: 1623 - DNA, 401 bp, Homo sapiens
gcttggatgaagaagggaaagaaagagaaagagactgaagcagagaagagccgcagaggaagaaagtgaatgagcactcaagaaggacaaagaggagtagtcgggggtggggtggaggcagggcggggaagggagtgaccgcccctcctggctgcactattgcctccggagccctctgatcctgtttgcagtgatgctcckagggcaggcacctgctgctctgtaatgattcagcccctttcagccgtcgtcgcgttaacacaacaggatgctgttgctattgtcactactgcctctcctgccgccgctgctgctgccgccgccgccaccgccgctggtcctccttctgcttttacttctcctgcatgacagttgttttcttcatctgagcagacaccagc

SEQ ID NO: 1624 - DNA, 1160 bp, Homo sapiens
gcctctcctgccgccgctgctgctgccgccgccgccaccgccgctggtcctccttctgcttttacttctcctgcatgacagttgttttcttcatctgagcagacaccagcttcagatgctcgaggtgagaaacatgcctttcagtttgggctactggtttacttaattaatcagccggcagctccgtcgatctattttcgtccctgtcctcttgacgagcccgggatggtttggagtagcatttaaaagaactagaaaagtggcccagaaacagcagcttaaagaattattacgatatactttgattttgtagttgctaggagcttttcttccccccttgcatctttctgaactcttcttgattttaataatggccttggacttggacgatttatcgatttccccctgtaagatgctgtatcatttggttgggggggcctctgcgtggtaatggaccgtgagagcggccaggccttcttctggaggtgagccgatggagatttattccccagacatgtctgaggtcgccgccgagaggtcctccagcccctccactcagctgagtgcagacccatctcttgatgggcttccggmagcagaagacatgccagagccccagactgaagatrggagaacccctggactcgtgggcctggccgtgccctgctgtgcgtgcctagaagctgagcgcctgagaggttgcctcaactcagagaaaatctgcattgtccccatcctggcttgcctggtcagcctctgcctctgcatcgccrgcctcaagtgggtatttgtggacaagatctttgaatatgactctcctactcaccttgaccctggggggttaggccaggaccctattatttctctggacscaactgctgcctcagctstgtgggtgtcgtctgaggcatacacttcacctgtctctagggctcaatctgaaagtgaggttcaagttacagtgcaaggtgacaaggctgttgtctcctttgaaccatcagcggcaccgacaccgaagaatcgtatttttgccttttctttcttgccgtccactgcgccatccttcccttcacccacccggaaccctgaggtgagaacgcccaagtcagcaactcagccacaaacaacagaaactaatctccaaactgctcctaaacttt

SEQ ID NO: 1625 - DNA, 400 bp, Homo sapiens
  misc_feature (1)...(400): n = A,T,C or G
aggcagggcggggaagggagtgaccgcccctcctggctgcactnttgcctccggagccctctgatcctgtttgcagtgatgctccgagggcaggcacctgctgctctgtaatgattcagcccctttcagccgtcgtcgcgttaacacaacaggatgctgttgctattgtcactactgcctctcctgccgccgctgctgctgccgccgccgccaccgccgctggtcctccttctgcttttacttctcctgcatgacagttgttttcttcatctgagcagacaccagcttcagatgctcgaggtgagaaacatgcctttcagtttgggctactggtttacttaattaatcagccggcagctccgtcgatctattttcgtccctgtcctcttgacgagcccgg

SEQ ID NO: 1626 - DNA, 401 bp, Homo sapiens
atcgatttccccctgtaagatgctgtatcatttggttgggggggcctctgcgtggtaatggaccgtgagagcggccaggccttcttctggaggtgagccgatggagatttattccccagacatgtctgaggtcgccgccgagaggtcctccagcccctccactcagctgagtgcagacccatctcttgatgggcttccggmagcagaagacatgccagagccccagactgaagatgggagaacccctggactcgtgggcctggccgtgccctgctgtgcgtgcctagaagctgagcgcctgagaggttgcctcaactcagagaaaatctgcattgtccccatcctggcttgcctggtcagcctctgcctctgcatcgccggcctcaagtgggtatttgtgg

SEQ ID NO: 1627 - DNA, 401 bp, Homo sapiens
ttgggggggcctctgcgtggtaatggaccgtgagagcggccaggccttcttctggaggtgagccgatggagatttattccccagacatgtctgaggtcgccgccgagaggtcctccagcccctccactcagctgagtgcagacccatctcttgatgggcttccggcagcagaagacatgccagagccccagactgaagatrggagaacccctggactcgtgggcctggccgtgccctgctgtgcgtgcctagaagctgagcgcctgagaggttgcctcaactcagagaaaatctgcattgtccccatcctggcttgcctggtcagcctctgcctctgcatcgccggcctcaagtgggtatttgtggacaagatctttgaatatgactctcctactcacctt

SEQ ID NO: 1628 - DNA, 401 bp, Homo sapiens
catctcttgatgggcttccggcagcagaagacatgccagagccccagactgaagatgggagaacccctggactcgtgggcctggccgtgccctgctgtgcgtgcctagaagctgagcgcctgagaggttgcctcaactcagagaaaatctgcattgtccccatcctggcttgcctggtcagcctctgcctctgcatcgccrgcctcaagtgggtatttgtggacaagatctttgaatatgactctcctactcaccttgaccctggggggttaggccaggaccctattatttctctggacgcaactgctgcctcagctgtgtgggtgtcgtctgaggcatacacttcacctgtctctagggctcaatctgaaagtgaggttcaagttacagtgcaaggtgac

SEQ ID NO: 1629 - DNA, 401 bp, Homo sapiens
cgtgcctagaagctgagcgcctgagaggttgcctcaactcagagaaaatctgcattgtccccatcctggcttgcctggtcagcctctgcctctgcatcgccggcctcaagtgggtatttgtggacaagatctttgaatatgactctcctactcaccttgaccctggggggttaggccaggaccctattatttctctggacscaactgctgcctcagctgtgtgggtgtcgtctgaggcatacacttcacctgtctctagggctcaatctgaaagtgaggttcaagttacagtgcaaggtgacaaggctgttgtctcctttgaaccatcagcggcaccgacaccgaagaatcgtatttttgccttttctttcttgccgtccactgcgccatccttcccttca

SEQ ID NO: 1630 - DNA, 400 bp, Homo sapiens
tcagatggcctgctgatatttgctttgcaggctagacggattgtactcctttagaatctaagtattgatggaaaaagattcaagggacagcttgaaagtttgtggactccggctatggaaattttatactcatataaaactgtcagtgattagtagaaaatatgtagcagaactgtgtttctggaattggcttctcagctaagattattggctttgtgaagaagaaaatgtagctttcttgtaactccatttagtcaattatccactatgggaagatacttttcttcttctttggaaaagctatgacatcctccatggtattcgtatcattgagatgtttctcctgagaaatagtagacttaggatgattagactgtgccatgagtaaaatgcactgtct

SEQ ID NO: 1631 - DNA, 401 bp, Homo sapiens
  misc_feature (1)...(401): n = A,T,C or G
aagtctacaaacctctaagtgctcccagcgtattagctaagtcctgagctccatggagttggatgccctaattctgctttagaaagtcctngttccattaaccgtctcctgagaattctcctggcttccctttttgtttcttgagcagagttcagtcaaggagaggtcaagagagatgatacattacttccagtcactgtrttggctctgggaacctccaactctatgcaggttctttgatctcctctggccactttctttctttttcaagtacatatttgctattcagcaaaggattgaatgacttctcaggaaaaaatgccaacccagaatgacaaggcttccgtggttctgagcctggctctgaacctttcctttggaaaactaatgactccacctat

SEQ ID NO: 1632 - DNA, 400 bp, Homo sapiens
tcctctggccactttctttctttttcaagtacatatttgctattcagcaaaggattgaatgacttctcaggaaaaaatgccaacccagaatgacaaggcttccgtggttctgagcctggctctgaacctttcctttggaaaactaatgactccacctatcattcccttggcatctagagaagctacattaggtggcacagctttctgctcagcttctgctccagagcttcatcttcaggaaccacctaagcatttttttccccagtaggagttcagtctgctcattatacctaattgcaaaggagctatattcagagcaagaataataatttcagattttttaactggacttcaaagagcaggaaagtatgcagattcctaaacacataagcattgaaga

SEQ ID NO: 1633 - DNA, 400 bp, Homo sapiens
  misc_feature (1)...(400): n = A,T,C or G
taaaaaaaatctgtaattttgtagtgactagcagtttaatattcaaacatttaaaatgtgcatattttattaagcnaatggcgtagagttatttggtttaattttctgtaagtaactcgtaaagaattgtcctaaaagctgtgggtgaggactaattcattcaagggaaacaggatctaatgattgcnttgtgaggtatacactgtatactcatgctaattcctgctaattgtcaaagaagaatagtggctttttatcagcagtttgcatttgtgtaatggtcctggtctactggttttgtctacttcactgataaggaaaacaccacttaaaacaagcaagaaaagcaagccatcctttacagtattattttctttttagcctgtcttgagaagaaaaa

SEQ ID NO: 1634 - DNA, 401 bp, Homo sapiens
  misc_feature (1)...(401): n = A,T,C or G
atgctgcctcttattccacatttcaacttcactctagttaaatttcagttaaccaatcatttgaagactgaagcaaacaacaacaaaaatctgtaacccacagttttcgtgggacatggttttctaaatgtngtgtcttttcttttctttatattgcttggtaccagatcatttttaggaatctccatattccataggagraaaattgccagtctgaaagctcagtgtctttagcattttttttttgcttaccacatttttgccctctaggtgccaacctggattcactggagcaagatgtactgagaatgtgcccatgaaagtccaaaaccaagaaagtatgtcaaaataatctgaaatttgctttctcccccaactacagcaacaatcactaccacttg

SEQ ID NO: 1635 - DNA, 59 bp, Homo sapiens
gtgcccaaatgagtttactggtgatcgctgccaaaactaygtaatggccagcttctaca

SEQ ID NO: 1636 - DNA, 401 bp, Homo sapiens
gccagagcctgaaagccatgatcagggcaaagattcagttcctgagggtgaactcaccaagtttcagtcaaatgacactgaaggagcttctttctagcatatattcacctcttctctttttctctgtttttctaccattgtttttttgtttcttctctcaggtgcccaaatgagtttactggtgatcgctgccaaaactaygtaatggccagcttctacagtacgtccactccctttctgtctctgcctgaataggagcatgctcagttggtgctgctttcttgttgctgcatctcccctcagattccacctagagctagatgtgtcttaccagatctaatattgactgcctctgcctgtcgcatgagaacattaacaaaagcaattgtattacttcctct

SEQ ID NO: 1637 - DNA, 401 bp, Homo sapiens
aactgtaaatgcagtaatatgtatgcatgggcatgctactaattttattgaagacttaaccaagctttctatgcaactaatatagatcatgagcagtgttcatgtaggcatggagtcctgactctctggaaagagtttctgtagacatcgcttgattttaacccttaaattattactgactggtaggagaaaaaggcaagrgaagggagggggctctagaaagaaaatctgggtcccaccttcatggaaatgagtaaggaaatttattattgacttccttggaaaatgaatgttttcacgtggatgttccaaagtttgtattaagaaagcaaatgggaaaaaaaatgaccaatttttgaccaattgagtgttgcacggaggcaagagaaatttatctggat

SEQ ID NO: 1638 - DNA, 401 bp, Homo sapiens
acagaacttctccctcagtaaggtcttttaagggttaataaagacacagtgtgctggtattttgcacacctcataaaaagagacgttccctatgtgaactcacagaggcgtacctgagcactgcttcttaaccacacaccatttgtctggttcaatgtgcatgcacagagagccataatagtcatgtgtaatgtgttttgsagtgcagtgtattgctcttttctgaaactttttccctttctttcttttttttgtcaactttctgcattggcagagcatcttgggattgaatttatgggtatggaccaatcatcattccttttagcctgcagaatttagagcctatgagctgaaatctttttcccttcctactcttacctttcagttcctaactaatttcc

SEQ ID NO: 1639 - DNA, 401 bp, Homo sapiens
tggattgattaggaaatttgtgattttagtcaattatcaagttatttgtgttatcctatttttttcttgtctctcagtaaaacagctaaatttccataagaatcccaggtggcttttaaaatctgtttggtaaggatgtgtggtttcacttattctgggatacagtggacatactcccttccctcttcctcatcaccagtytactgccttgaactactcataggtgttggtagaataaagacttggctctactatgaaatgaaaataatcaaaaaaaaataaatgctccctttcttatgtccaggaaacagcggaaaaagctgcatgaccgtcttcggcagagccttcggtctgaacgaaacaatacgatgaacattgccaatgggcctcaccatcctaac

SEQ ID NO: 1640 - DNA, 401 bp, Homo sapiens
attgattaggaaatttgtgattttagtcaattatcaagttatttgtgttatcctatttttttcttgtctctcagtaaaacagctaaatttccataagaatcccaggtggcttttaaaatctgtttggtaaggatgtgtggtttcacttattctgggatacagtggacatactcccttccctcttcctcatcaccagtctamtgccttgaactactcataggtgttggtagaataaagacttggctctactatgaaatgaaaataatcaaaaaaaaataaatgctccctttcttatgtccaggaaacagcggaaaaagctgcatgaccgtcttcggcagagccttcggtctgaacgaaacaatacgatgaacattgccaatgggcctcaccatcctaaccca

SEQ ID NO: 1641 - DNA, 401 bp, Homo sapiens
gaaatttgtgattttagtcaattatcaagttatttgtgttatcctatttttttcttgtctctcagtaaaacagctaaatttccataagaatcccaggtggcttttaaaatctgtttggtaaggatgtgtggtttcacttattctgggatacagtggacatactcccttccctcttcctcatcaccagtctactgccttgarctactcataggtgttggtagaataaagacttggctctactatgaaatgaaaataatcaaaaaaaaataaatgctccctttcttatgtccaggaaacagcggaaaaagctgcatgaccgtcttcggcagagccttcggtctgaacgaaacaatacgatgaacattgccaatgggcctcaccatcctaacccaccccccgag

SEQ ID NO: 1642 - DNA, 400 bp, Homo sapiens
aaaacagctaaatttccataagaatcccaggtggcttttaaaatctgtttggtaaggatgtgtggtttcacttattctgggatacagtggacatactcccttccctcttcctcatcaccagtctactgccttgaactactcataggtgttggtagaataaagacttggctctactatgaaatgaaaataatcaaaaaaaataaatgctccctttcttatgtccaggaaacagcggaaaaagctgcatgaccgtcttcggcagagccttcggtctgaacgaaacaatacgatgaacattgccaatgggcctcaccatcctaacccaccccccgagaatgtccagctggtgaatgtacgttgactctggccagtggaaaaaactgagcctctctcctttgtt

SEQ ID NO: 1643 - DNA, 401 bp, Homo sapiens
acagcggaaaaagctgcatgaccgtcttcggcagagccttcggtctgaacgaaacaatacgatgaacattgccaatgggcctcaccatcctaacccaccccccgagaatgtccagctggtgaatgtacgttgactctggccagtggaaaaaactgagcctctctcctttgttcagacgccttgaagtttattttcgaaagmtcttaagcttttagctgctgccattaatcaccatggcttccaggaatccaggtttttgccaggagaaaataatgggaacatttttaaaagtggatttggttactgtaaaatcagcacatttcctcttataaagtgttcattaaggggttggaataatagtgttgggtttgttctgcaaggaggccatagctggggcttgc

SEQ ID NO: 1644 - DNA, 401 bp, Homo sapiens
cacatccagagagtatttttttttttaactctattcatctaatctaaaagccacagtagccaggacaggattttccacctggccattggggaaatggaatttattacaaatcagctgtacaaaaatagatttgtgtgtttctgacagtgttaacgtttttatttacatgacaatattagtgctttgattgacatgaatctrcgtgaatcttcaagttgtgtctctttgtttatccagcaatacgtatctaaaaacgtcatctccagtgagcatattgttgagagagaagcagagacatccttttccaccagtcactatacttccacagcccatcactccactactgtcacccagactcctagccacaggtatgagaatttaaaaattccacggcttttctc

SEQ ID NO: 1645 - DNA, 401 bp, Homo sapiens
ccttacaaagccaatctgaatcaagatcctctctatagcaaattacctttgtggcgattctattcggagacaagtgatgttacagtgagctccgggtgcatcagtagtttgaaacatttgtcagaatccattcctttcatttccatttttttgcatataatttttgcacgaaatatctgattgtctctcccatttcctccrcagctggagcaacggacacactgaaagcatcctttccgaaagccactctgtaatcgtgatgtcatccgtagaaaacagtaggcacagcagcccaactgggggcccaagaggacgtcttaatggcacaggaggccctcgtgaatgtaacagcttcctcaggcatgccagagaaacccctgattcctaccgagactctcctc

SEQ ID NO: 1646 - DNA, 401 bp, Homo sapiens
caaattacctttgtggcgattctattcggagacaagtgatgttacagtgagctccgggtgcatcagtagtttgaaacatttgtcagaatccattcctttcatttccatttttttgcatataatttttgcacgaaatatctgattgtctctcccatttcctccgcagctggagcaacggacacactgaaagcatcctttccraaagccactctgtaatcgtgatgtcatccgtagaaaacagtaggcacagcagcccaactgggggcccaagaggacgtcttaatggcacaggaggccctcgtgaatgtaacagcttcctcaggcatgccagagaaacccctgattcctaccgagactctcctcatagtgaaaggtaaaaccgaagggcaaagctactgcag

SEQ ID NO: 1647 - DNA, 207 bp, Homo sapiens
ctggagcaacggacacactgaaagcatcctttccraaagccactctgtaatcgtgatgtcatccgtagaaaacagtaggcacagcagcccaactgggggcccaagaggacgtcttaatggcacaggaggccctcgtgaatgtaacagcttcctcaggcatgccagagaaacccctgattcctaccgagactctcctcatagtgaaag

SEQ ID NO: 1648 - DNA, 844 bp, Homo sapiens
gtatgtgtcagccatgaccaccccggctcgtatgtcacctgtagatttccacacgccaagctcccccaaatcgcccccttcggaaatgtctccaccygtgtccagcatgacggtgtccatgccttccatggcggtcagccccttcatggaagaagagagacctctacttctcgtgacaccaccaaggctgcgggagaagaagtttgaccatcaccctcagcagttcagctccttccaccacaaccccgcgcatgacagtaacagcctccctgctagccccttgaggatagtggaggatgaggagtatgaaacgacccaagagtacgagccagcccaagagcctgttaagaaactcgccaatagcyrgcgggccaaaagaaccaagcccaatggccacattgctaacagattggaagtggacagcaacacaagctcccagagcagtaactcagagagtgaaacagaagatgaaagagtaggtgaagatacgcctttcctgggcatacagaaccccctggcagccagtcttgaggcaacacmtgccttccgcctggctgacagcaggactaacccagcagkccgcttctcgacacaggaagaaatccaggccaggctgtctagtgtaattgctaaccaagaccctattgctgtataaaacctaaataaacacagattcacctgtaaaactttattttatataataaagtattccaccttaaattaaacaatttattttattttagcagttctgcaaatagaaaacaggaaaaaaacttttataaattaaatatatgtatgtaaaaatgtgttatgtgccatatgtagcaattttttacagtatttc

SEQ ID NO: 1649 - DNA, 401 bp, Homo sapiens
gcctgttaagaaactcgccaatagccggcgggccaaaagaaccaagcccaatggccacattgctaacagattggaagtggacagcaacacaagctcccagagcagtaactcagagagtgaaacagaagatgaaagagtaggtgaagatacgcctttcctgggcatacagaaccccctggcagccagtcttgaggcaacacmtgccttccgcctggctgacagcaggactaacccagcaggccgcttctcgacacaggaagaaatccaggccaggctgtctagtgtaattgctaaccaagaccctattgctgtataaaacctaaataaacacatagattcacctgtaaaactttattttatataataaagtattccaccttaaattaaacaatttattttat

SEQ ID NO: 1650 - DNA, 401 bp, Homo sapiens
aaccaagcccaatggccacattgctaacagattggaagtggacagcaacacaagctcccagagcagtaactcagagagtgaaacagaagatgaaagagtaggtgaagatacgcctttcctgggcatacagaaccccctggcagccagtcttgaggcaacacktgccttccgcctggctgacagcaggactaacccagcaggccgcttctcgacacaggaagaaatccaggccaggctgtctagtgtaattgctaaccaagaccctattgctgtataaaacctaaataaacacatagattcacctgtaaaactttattttatataataaagtattccaccttaaattaaacaatttattttattttagcagttctgcaaatagaaaacaggaaaaaaacttt

SEQ ID NO: 1651 - DNA, 400 bp, Homo sapiens
aaagagtaggtgaagatacgcctttcctgggcatacagaaccccctggcagccagtcttgaggcaacacctgccttccgcctggctgacagcaggactaacccagcaggccgcttctcgacacaggaagaaatccaggccaggctgtctagtgtaattgctaaccaagaccctattgctgtataaaacctaaataaacacagattcacctgtaaaactttattttatataataaagtattccaccttaaattaaacaatttattttattttagcagttctgcaaatagaaaacaggaaaaaaacttttataaattaaatatatgtatgtaaaaatgtgttatgtgccatatgtagcaattttttacagtatttcaaaacgagaaagatatcaatggtgcc

SEQ ID NO: 1652 - DNA, 401 bp, Homo sapiens
taaatatatgtatgtaaaaatgtgttatgtgccatatgtagcaattttttacagtatttcaaaacgagaaagatatcaatggtgcctttatgttatgttatgtcgagagcaagttttgtacagttacagtgattgcttttccacagtatttctgcaaaacctctcatagattcagtttttgctggcttcttgtgcattgcmttatgatgttgactggatgtatgatttgcaagacttgcaactgtccctctgtttgcttgtagtagcacccgatcagtatgtcttgtaatggcacatccatccagatatgcctctcttgtgtatgaagttttctttgctttcagaatatgaaatgagttgtgtctactctgccagccaaaggtttgcctcattgggctctg

SEQ ID NO: 1653 - DNA, 401 bp, Homo sapiens
  misc_feature (1)...(401): n = A,T,C or G
taaatctcttcaaatattaagagtttgactctttgacaactaatacatatatattttaataaccactatgtgccaggaactgtgcttcatatatattattgtgtaattctcanagtaattcccatgacataactatagtacatctgttttaaagatagagaaactgaggctcaaaaagactaagtattttgtaaatattcwaagactggaaataatatttgatttcaagattttcttattccaaaatgtgttctgatctgctgctctaccccatctctactaaaaatacaaaaattagctgggtgcagtggtgcacacctgtaatcccagctacttgggatactgaggtaggagaatcacttgaattcaggaggcagaggttgcagtgagctgagattgca

SEQ ID NO: 1654 - DNA, 401 bp, Homo sapiens
tcaaaaagactaagtattttgtaaatattctaagactggaaataatatttgatttcaagattttcttattccaaaatgtgttctgatctgctgctctaccccatctctactaaaaatacaaaaattagctgggtgcagtggtgcacacctgtaatcccagctacttgggatactgaggtaggagaatcacttgaattcagraggcagaggttgcagtgagctgagattgcaccactgccctccagcctgggtgacagagcaaaaatctgtctcaaaaataaataaatacgtaaatataaaattaaattaactcttgcttgtctcatgacaggtaaagatgatgggacagtggctgcctatcttcagataaaataaaggtaatctccacattaacattacta

SEQ ID NO: 1655 - DNA, 401 bp, Homo sapiens
cccaaacatagaaaagtaactcctagcaggaggcagaagagagcacttaacattatgcggccaagaggttacactggctgctgcctcttatcaatgggtctttcaggtcctttttgggagcaatcctgggcttcattgccctgcctaaactgtagtttccaagcagtttctcaggcagttcctgttacattctgtgatccygcctaatacagtaatttgattccagttgaaaacttccattacatacatgtcttgaatcgggagagttagagccttatactttgttcctctgcaaaactgtaagagcatcactgctgtattaaagggaagtgagtggaaagttgcaaagtgagcctttgagttcaagaaaacagatgaaaatgagcccaagccttggaact

SEQ ID NO: 1656 - DNA, 401 bp, Homo sapiens
ttgccctgcctaaactgtagtttccaagcagtttctcaggcagttcctgttacattctgtgatcctgcctaatacagtaatttgattccagttgaaaacttccattacatacatgtcttgaatcgggagagttagagccttatactttgttcctctgcaaaactgtaagagcatcactgctgtattaaagggaagtgagtrgaaagttgcaaagtgagcctttgagttcaagaaaacagatgaaaatgagcccaagccttggaactacagttctaagttttgagtggtggacagagtgggaaaccacgtagcatgcaaaggggagcggaagggcagaggaaggaagcaaggctacagtgtttggctgtgttctaatgtgctctggcatggagttatcgtga

SEQ ID NO: 1657 - DNA, 401 bp, Homo sapiens
actgtaagagcatcactgctgtattaaagggaagtgagtggaaagttgcaaagtgagcctttgagttcaagaaaacagatgaaaatgagcccaagccttggaactacagttctaagttttgagtggtggacagagtgggaaaccacgtagcatgcaaaggggagcggaagggcagaggaaggaagcaaggctacagtgttkggctgtgttctaatgtgctctggcatggagttatcgtgagtggaactaatattacataacactatgtatattttggaagatggctgggaaatagcctttggagccaatggagatttattaaataaaaattacctcaagcttgatttttcatctttaccaagcaccatagtaaattggcatctctgagactcctgcgggag

SEQ ID NO: 1658 - DNA, 401 bp, Homo sapiens
aaaaaaaaaaagtgaagatattgccacaggtctcaggtcctctttccctgcttcactttctattagttttatcagttaggtttacatttactaagtttagagcatatacaatctttttttctttttttttttttgagacggagtctcgctctgtcgcccaggctggagtgcagcggcaggatctcgactcactgcaagctycgcctaccagattcacgccattctcctgcctcagaccccggagtagccgggactacaggcgcctgtgcaatctctatggtaaccacatttcccagttgactactaccggtaataaaatcaaatggattcagtgctcacaactcttcagtctttgggctactttccattcttgaatttttagctgaattcatctctttggc

SEQ ID NO: 1659 - DNA, 401 bp, Homo sapiens
tattagttttatcagttaggtttacatttactaagtttagagcatatacaatctttttttctttttttttttttgagacggagtctcgctctgtcgcccaggctggagtgcagcggcaggatctcgactcactgcaagctccgcctaccagattcacgccattctcctgcctcagaccccggagtagccgggactacaggygcctgtgcaatctctatggtaaccacatttcccagttgactactaccggtaataaaatcaaatggattcagtgctcacaactcttcagtctttgggctactttccattcttgaatttttagctgaattcatctctttggctggattttgtggtaaagtagttttttgcttattttttcccccaagaagggcttacatggg

SEQ ID NO: 1660 - DNA, 557 bp, Homo sapiens
aatcgggcagccattagaaccaaaacagttctgaggagctcccaggctgcaatgtggtgcgaaatgttttatggacagaaaatggaaatgaggtgcagaaattggaggtgagattcagagatagctgattggttacagctcagcctttgccttgtttgaacatggtttgaacagttgattgactgaagctaggctgctgtgattggctgatactttactatttgttacaaaggcaaattcctaatttaagctttcaaattgtttaartactaagttaggttttactttgttacttaggactcatatcgaggtttctaaagcccacatctgatacgatttaacattacctatgtgaagaattactaagcagaaacattttgaaagcctcatgacctgaatcgtattaaatacttaacaattgaatttgtctcaataataattatgtttaaaattatgaatgctggtttgtaaaaaaaaagccacaaattttaaaattctgatataatctaatatctggtattcagctttrtattatcattttaaaatttaatgaacat

SEQ ID NO: 1661 - DNA, 400 bp, Homo sapiens
ctaagttaggttttactttgttacttaggactcatatcgaggtttctaaagcccacatctgatacgatttaacattacctatgtgaagaattactaagcagaaacattttgaaagcctcatgacctgaatcgtattaaatacttaacaattgaatttgtctcaataataattatgtttaaaattatgaatgctggtttgtaaaaaaaaagccacaaattttaaaattctgatataatctaatatctggtattcagctttgtattatcattttaaaatttaatgaacatctctggactctaaatatttttctttttaaagttatataaaacattctctttatattcattataactattaaactatttgcctacttatttatattgaaagtccttaatattt

SEQ ID NO: 1662 - DNA, 401 bp, Homo sapiens
gatacgatttaacattacctatgtgaagaattactaagcagaaacattttgaaagcctcatgacctgaatcgtattaaatacttaacaattgaatttgtctcaataataattatgtttaaaattatgaatgctggtttgtaaaaaaaaaagccacaaattttaaaattctgatataatctaatatctggtattcagctttrtattatcattttaaaatttaatgaacatctctggactctaaatatttttctttttaaagttatataaaacattctctttatattcattataactattaaactatttgcctacttatttatattgaaagtccttaatatttttacaataatttaataggtttcacaatcatcattacttattatagtttatactgtttgaa

SEQ ID NO: 1663 - DNA, 178 bp, Homo sapiens
gctaagaataaacttgaagacaaagagtagattttgrccagacactgatgctaaagtcaccccgatgctgtctttgcttctaaggtataaattaccttattttwagcaactttttcaccttttcaactctatccctttcctcagcctctttcatatgtgaaataaaatattcacttac

SEQ ID NO: 1664 - DNA, 401 bp, Homo sapiens
ttaacatttgtagtggcagtgaatcctaggggcagccttgcatgttaatgttatgtggttgatttgagaggatggggatctgtgtaatcatatgatgacaatttgggtttgggaatctcagaaatgccatcagtataggaatatggctattctgctcttcctaggctaagaataaacttgaagacaaagagtagattttgrccagacactgatgctaaagtcaccccgatgctgtctttgcttctaaggtataaattaccttattttaagcaactttttcaccttttcaactctatccctttcctcagcctctttcatatgtgaaataaaatattcacttactactgaggatgattttttttaaacctattaaagaatactccatagctacagaggggacc

SEQ ID NO: 1665 - DNA, 401 bp, Homo sapiens
tgctaaagtcaccccgatgctgtctttgcttctaaggtataaattaccttattttaagcaactttttcaccttttcaactctatccctttcctcagcctctttcatatgtgaaataaaatattcacttactactgaggatgattttttttaaacctattaaagaatactccatagctacagaggggaccatatcctttagrgactccgttggggatgatcatatgcagaattattcttgtccctttgcctctgcttaatccccttcacaaagtctgtggctcaaacaaatgagagttggcagtactaaaggaataagttcccagcatacgtctgccatgctttagcatcatttcagattagaagcatggagcaaaggcagggagacgggtcaaacaaaatg

SEQ ID NO: 1666 - DNA, 401 bp, Homo sapiens
ttcctcccttaaacctcaggcaggcactttttcaaaagagaaatcaatcagtcaatcaatcagtcaatcaacagtgagtgaatgaatgactaaattgtttgtttttagcatggcataaaataatccttaatattttgacctcaagcaaccattctgaccatatcttcttccatgcgcctttgactgagtacccagatacaygcagagtcaagttttctagatcacagccttgtcctctaattcagtgccttggtatgaaatctttcttcttctatgtcctttttttgccagatgaaatttcagtctttattcaagatcaagtgcaactgtctctttgaggaaagtcctttgaccgccatttctccccttcagaaggcaaacacctgggggagaagatctgc

SEQ ID NO: 1667 - DNA, 401 bp, Homo sapiens
tgtgttctcatcgaataattcttaaatgaccctatttagtttgattttctaactacattagaaatatatgaaacaattaagaaatcattttttacctgtcatatggcagatggactaacattgatcagggcagtcgaggaggttgtaaggaaatgggtactctcaaacattgctggtgggactatgaagtgttttaatttkttttttttttttagacggaggtttgctcttgttgtccaggctggagtgaaatggcgtgatctcggctcactgcatcctctgcctcagcctcccgagtagctggaattacaggcaccctccaccatgcccagctaatttttgtattttcagtagagacagggtttcaccatgttggccaggctggtcttaaactcctaacc

SEQ ID NO: 1668 - DNA, 401 bp, Homo sapiens
cactacaattgtcattttattttaccttccccttgtaaggtcaaataaaatgttagaatatatagattcatagactatcaactctgagagggaccttaaatatcacatactttattatggaacacttagcacagataaaaaaattcaaacactcactaagagtcacttcatcaaggtaccaaaacataggttaagctactycactatgttttagatgctcacactgtatctttcttcacgacttcataataaagattaagcgttgtgttttggatagtccacgttgtgctgtaagtgtgctactaaattccataccagatactgcctctgagaagcttcagaagaagcaatgaattataaagaatgctaatgcgtagtaaccaggggttacaggtgggaac

SEQ ID NO: 1669 - DNA, 401 bp, Homo sapiens
aaattgtcccttttctgaacagcatttaatcatactgaacaattattcataccttttcttaagcatatgttaatcatattagaaatgccattcccttctcgtgcaaaagggcaaaatcagcaacatccttccaatgtgggtgggtaaatgaaggctctgatacaagaattgaaatgaaatatgtgtgcaaacagttcttaktactgagctgtttaaagaaggcctacctttgcacagaaaatgtctataagaattactcattaatgccacttaatagaggaagagtaggagataacgtgggaacagggtctttttaaaaaataccactttaaagaagaggcttatgcttcatcatagacaaaatgctttgtatagtactaacaggggcatatctattcctt

SEQ ID NO: 1670 - DNA, 401 bp, Homo sapiens
atatagtgacagataactgatacaaatctggaaggtagagaggaagaaagtgttctaggccagagttgtacctcccaaaaagtcgagtcagaaatatgggaggccaggctaaagaaaagtaaagaaattagtaggattggatgtttgaaccactttctttcagtaaatcgctagaagcacccatgcagggttcaagtgaaygtatactggaggccagacctgcccaactatgctgctaaatggtgatcttctcctgaagcgctccatcagggtatgagtaacagggaactccccttgccaagacacacagggagtgtgatgaccctgtccctccaaactgcactttgagagaatggaaccttgttttgtagccaactatattatgccaagaacaaaaagat

SEQ ID NO: 1671 - DNA, 401 bp, Homo sapiens
cagaaatattttcacagatccatttttctctgtgtgacggaggttacataattatatcagtggatgtcctgcagtccagctggtatatgtagagcaactgcatgtttgtatcactctgttaggtgcagtgtaggacacaaataaagagagagaagggagagaacactgccgagtcattaggggcatgctttcagttcctawacagccaagtttttttttaggcttggcctatgcttttttcttagtttgggtttagtatgtattcattcattcatattgccatgtgtgttcaacaaatattttgggatgcctgctctgtgccagacattgtgctaggttagagggatgcaaagacaaattagaactccttttctcaaggagacttctggttattgtatttg

SEQ ID NO: 1672 - DNA, 401 bp, Homo sapiens
gtttggtacttcagtggttgattaactgtttcttaatcctgaaatgtggaggaggtttttgcaagtggttgtagcctggttttgaatgaaggtgaaaatgctctttttgttagctctagatcagcagaggtgaataagcatcatgaatttaggagactggcgtttttttttacataaaagttgctttgttgctaattagtrgattagaattcctttaattgcattctgaccaaagacttttgggtgttcaggagggcaagttagcatgtgttgcatttgaatttatacatttgagacacattttcttactgaagctgatattcatgaagcagaaaagataaaaacttgtacatacctttttatttcttgattttaatgttgaagttctattctcagaatgg

SEQ ID NO: 1673 - DNA, 401 bp, Homo sapiens
actcataatgctgaagacatagtaacaacaatttataataggagagcagttttgtgcagcaaaatagttccgtggagcagaattagatcatgaaaatgttgcatggtgggcatttagtcgtgaaagtataaatctgtacctaatgattgatgtgaatcaggtttcaaacctattagatgtgccatttaaccaggcaacatwtgcccattatttttttgcatgaaaagtaattaccgtatgtttaatagttactgaattgtgactggcaggtgtgccccaccataataataatgatgacaataataatatcttcaacttcaactcactctccacaagtcagggcaaagagagaataaacaatgattatttggcgtgtttgaataatataaaagccagtctag

SEQ ID NO: 1674 - DNA, 401 bp, Homo sapiens
acctctggcatcataaaccatccttccctctgacctctgtgtgaatcagcagactatgatctctgcagaatttaggattaattgcagcaaagaaaaagaacctctctgaaatctaaaatgtagacttggtcattagttcattttgcatgctgtggaaactatatttggcatcattaacagctgcttccatgagatgttgrgcactaaaatatgattggtgaacactcaggattttattttgtggtattggttgcaattatggagatgttgatagatcaatttccacatcatctaaacccttaactaagaaataaagtggtacataatatgcatgtcccctctatatgagactttgttaattttcttaatttaaaaaatttttttaattctatgaaggaaaa

SEQ ID NO: 1675 - DNA, 55 bp, Artificial Sequence
  Nucleic Acid Primer
ggggacaagtttgtacaaaaaagcaggctccaccatggacacctatcgctatata

SEQ ID NO: 1676 - DNA, 29 bp, Artificial Sequence
  Nucleic Acid Primer
ggggaccactttgtacaagaaagctgggt
